(19) United States
(12) Patent Application Publication
(10) Pub. No.: US 2004/0053822 A1
(43) Pub. Date: Mar. 18, 2004

(54) Inducing cellular immune responses to mage2/3 using peptide and nucleic acid compositions

(76) Inventors: John Fikes, San Diego, CA (US); Alessandro Sette, La Jolla, CA (US); John Sidney, San Diego, CA (US); Scott Southwood, Santee, CA (US); Robert Chesnut, Cardiff-by-the-Sea, CA (US); Esteban Celis, Rochester, MN (US); Elissa Keogh, San Diego, CA (US)

Correspondence Address: STERNE, KESSLER, GOLDSTEIN & FOX PLLC, 1100 NEW YORK AVENUE, N.W., WASHINGTON, DC, 20005, US

(21) Appl. No.: 10/149,135

(22) PCT Filed: Dec. 11, 2000
(86) PCT No.: PCT/US00/33545

(51) Int. Cl. A61K 38/17; C07K 14/74; A61K 9/127

(52) U.S. Cl. 514/12; 530/350; 530/359; 424/450

(57) ABSTRACT

The invention uses our knowledge of the mechanisms by which antigen is recognized by T cells to identify and prepare MAGE2/3 epitopes, and to develop epitope-based vaccines directed towards MAGE2/3-bearing tumors. More specifically, this application communicates our discovery of pharmaceutical compositions and methods of use it) the prevention and treatment of cancer.

### I. BACKGROUND OF THE INVENTION

[0001] A growing body of evidence suggests that cytotoxic T lymphocytes (CTL) are important in the immune response to tumor cells. CTL recognize peptide epitopes in the context of HLA class I molecules that are expressed on the surface of almost all nucleated cells. Following intracellular processing of endogenously synthesized tumor antigens, antigen-derived peptide epitopes bind to class I HLA molecules in the endoplasmic reticulum, and the resulting complex is then transported to the cell surface. CTL recognize the peptide-HLA class I complex, which then results in the destruction of the cell bearing the HLA-peptide complex directly by the CTL and/or via the activation of non-destructive mechanisms, e.g., activation of lymphokines such as tumor necrosis factor-α (TNF-α) or interferon-γ(IFNγ) which enhance the immune response and facilitate the destruction of the tumor cell.

[0002] Tumor-specific helper T lymphocytes (HTLs) are also known to be important for maintaining effective antitumor immunity. Their role in antitumor immunity has been demonstrated in animal models in which these cells not only serve to provide help for induction of CTL and antibody responses, but also provide effector functions, which are mediated by direct cell contact and also by secretion of lymphokines (e.g., IFNγ and TNF-α.

[0003] A fundamental challenge in the development of an efficacious tumor vaccine is immune suppression or tolerance that can occur. There is therefore a need to establish vaccine embodiments that elicit immune responses of sufficient breadth and vigor to prevent progression and/or clear the tumor.

[0004] The epitope approach employed in the present invention represents a solution to this challenge, in that it allows the incorporation of various antibody, CTL and HTL epitopes, from discrete regions of a target tumor-associated antigen (TAA), and/or regions of other TAAs, in a single vaccine composition. Such a composition can simultaneously target multiple dominant and subdominant epitopes and thereby be used to achieve effective immunization in a diverse population.

[0005] MAGE, melanoma antigen genes, are a family of related proteins that were first described in 1991.

[0006] Van der Bruggen and co-workers identified the MAGE gene after isolating CTLs from a patient who demonstrated spontaneous tumor regression. These CTLs recognized melanoma cell lines as well as tumor lines from other patient all of whom expressed the same HLA-A-1 -restricted gene (van der Bruggen et al., Science 254:1643-1647, 1991; DePlaen et al., Immunogenetics 40:360-369, 1994). The MAGE genes are expressed in metastatic melanomas (see, e.g., Brasseur et al., Int. J. Cancer 63:375-380, 1995), non-small lung (Weynants et al., Int. J. Cancer 56:826-829, 1994), gastric (Inoue et al., Gastroenterology 109:1522-1525, 1995), hepatocellular (Chen et al., Liver 19:110-114, 1999), renal (Yamanaka et al., Human Pathol. 24:1127-1134, 1998), colorectal (Mori et al., Ann. Surg. 224:183-188, 1996), and esophageal (Quillien et al., Anticancer Res. 17:387-391, 1997) carcinomas as well as tumors of the head and neck (Lett et al., Acta Otolaryngol. 116:633-639, 1996), ovaries (Gillespie et al., Br J. Cancer 78:816-821, 1998; Yamada et al., Int. J Cancer 64:388-393, 1995), bladder, and osteosarcoma (Sudo et al., J. Orthop. Res. 15:128-132, 1997). Thus, MAGE2/3 are important targets for cancer immunotherapy.

[0007] The information provided in this section is intended to disclose the presently understood state of the art as of the filing date of the present application. Information is included in this section which was generated subsequent to the priority date of this application. Accordingly, information in this section is not intended, in any way, to delineate the priority date for the invention.

### II. SUMMARY OF THE INVENTION

[0008] This invention applies our knowledge of the mechanisms by which antigen is recognized by T cells, for example, to develop epitope-based vaccines directed towards TAAs. More specifically, this application communicates our discovery of specific epitope pharmaceutical compositions and methods of use in the prevention and treatment of cancer.

[0009] Upon development of appropriate technology, the use of epitope-based vaccines has several advantages over current vaccines, particularly when compared to the use of whole antigens in vaccine compositions. For example, immunosuppressive epitopes that may be present in whole antigens can be avoided with the use of epitope-based vaccines. Such immunosuppressive epitopes may, e.g., correspond to immunodominant epitopes in whole antigens, which may be avoided by selecting peptide epitopes from non-dominant regions (see, e.g., Disis et al., J. Immunol. 156:3151-3158, 1996).

[0010] An additional advantage of an epitope-based vaccine approach is the ability to combine selected epitopes (CTL and HTL), and further, to modify the composition of the epitopes, achieving, for example, enhanced immunogenicity. Accordingly, the immune response can be modulated, as appropriate, for the target disease. Similar engineering of the response is not possible with traditional approaches.

[0011] Another major benefit of epitope-based immune-stimulating vaccines is their safety. The possible pathological side effects caused by infectious agents or whole protein antigens, which might have their own intrinsic biological activity, is eliminated.

[0012] An epitope-based vaccine also provides the ability to direct and focus an immune response to multiple selected antigens from the same pathogen (a “pathogen” may be an infectious agent or a tumor associated molecule). Thus, patient-by-patient variability in the immune response to a particular pathogen may be alleviated by inclusion of epitopes from multiple antigens from the pathogen in a vaccine composition.

[0013] Furthermore, an epitope-based anti-tumor vaccine also provides the opportunity to combine epitopes derived from multiple tumor-associated molecules. This capability can therefore address the problem of tumor-to tumor variability that arises when developing a broadly targeted anti-tumor vaccine for a given tumor type and can also reduce the likelihood of tumor escape due to antigen loss. For example, a melanoma in one patient may express a target TAA that differs from a melanoma in another patient. Epitopes derived from multiple TAAs can be included in a polyepitopic vaccine that will target both melanomas.

[0014] One of the most formidable obstacles to the development of broadly efficacious epitope-based immunotherapeutics, however, has been the extreme polymorphism of HLA molecules. To date, effective non-genetically biased coverage of a population has been a task of considerable complexity; such coverage has required that epitopes be used that are specific for HLA molecules corresponding to each individual HLA allele. Impractically large numbers of epitopes would therefore have to be used in order to cover ethnically diverse populations. Thus, there has existed a need for peptide epitopes that are bound by multiple HLA antigen molecules for use in epitope-based vaccines. The greater the number of HLA antigen molecules bound, the greater the breadth of population coverage by the vaccine.

[0015] Furthermore, as described herein in greater detail, a need has existed to modulate peptide binding properties, e.g., so that peptides that are able to bind to multiple HLA molecules do so with an affinity that will stimulate an immune response. Identification of epitopes restricted by more than one HLA allele at an affinity that correlates with immunogenicity is important to provide thorough population coverage, and to allow the elicitation of responses of sufficient vigor to prevent or clear an infection in a diverse segment of the population. Such a response can also target a broad array of epitopes. The technology disclosed herein provides for such favored immune responses.

[0016] In a preferred embodiment, epitopes for inclusion in vaccine compositions of the invention are selected by a process whereby protein sequences of known antigens are evaluated for the presence of motif or supermotif-bearing epitopes. Peptides corresponding to a motif- or supermotif-bearing epitope are then synthesized and tested for the ability to bind to the HLA molecule that recognizes the selected motif. Those peptides that bind at an intermediate or high affinity ie., an IC₅₀ (or a K_{D} value) of 500 nM or less for HLA class I molecules or an IC₅₀ of 1000 nM or less for HLA class II molecules, are further evaluated for their ability to induce a CTL or HTL response. Immunogenic peptide epitopes are selected for inclusion in vaccine compositions.

[0017] Supermotif-bearing peptides may additionally be tested for the ability to bind to multiple alleles within the HLA supertype family. Moreover, peptide epitopes may be analogued to modify binding affinity and/or the ability to bind to multiple alleles within an HLA supertype.

[0018] The invention also includes embodiments comprising methods for monitoring or evaluating an immune response to a TAA in a patient having a known HLA-type. Such methods comprise incubating a T lymphocyte sample from the patient with a peptide composition comprising a TAA epitope that has an amino acid sequence described in, for example, Tables XXIII, XXIV, XXV, XXVI, XXVII, and XXXI which binds the product of at least one HLA allele present in the patient, and detecting for the presence of a T lymphocyte that binds to the peptide. A CTL peptide epitope may, for example, be used as a component of a tetrameric complex for this type of analysis.

[0019] An alternative modality for defining the peptide epitopes in accordance with the invention is to recite the physical properties, such as length; primary structure; or charge, which are correlated with binding to a particular allele-specific HLA molecule or group of allele-specific HLA molecules. A further modality for defining peptide epitopes is to recite the physical properties of an HLA binding pocket, or properties shared by several allele-specific HLA binding pockets (e.g. pocket configuration and charge distribution) and reciting that the peptide epitope fits and binds to the pocket or pockets.

[0020] As will be apparent from the discussion below, other methods and embodiments are also contemplated. Further, novel synthetic peptides produced by any of the methods described herein are also part of the invention.

### III. BRIEF DESCRIPTION OF THE FIGURES

[0021] not applicable

### IV. DETAILED DESCRIPTION OF THE INVENTION

[0022] The peptide epitopes and corresponding nucleic acid compositions of the present invention are useful for stimulating an immune response to a TAA by stimulating the production of CTL or HTL responses. The peptide epitopes, which are derived directly or indirectly from native TAA protein amino acid sequences, are able to bind to HLA molecules and stimulate an immune response to the TAA. The complete sequence of the TAA proteins to be analyzed can be obtained from GenBank. Peptide epitopes and analogs thereof can also be readily determined from sequence information that may subsequently be discovered for heretofore unknown variants of particular TAAs, as will be clear from the disclosure provided below.

[0023] A list of target TAA includes, but is not limited to, the following antigens: MAGE 1, MAGE 2, MAGE 3, MAGE-11, MAGE-A10, BAGE, GAGE, RAGE, MAGE-C1, LAGE-1, CAG-3, DAM, MUC1, MUC2, MUC18, NY-ESO-1, MUM-1, CDK4, BRCA2, NY-LU-1, NY-LU-7, NY-LU-12, CASP8, RAS, KIAA-2-5, SCCs, p53, p73, CEA, Her 2/neu, Melan-A, gp100, tyrosinase, TRP2, gp75/TRP1, kallikrein, PSM, PAP, PSA, PT1-1, B-catenin, PRAME, Telomerase, FAK, cyclin D1 protein, NOEY2, EGF-R, SART-1, CAPB, HPVE7, p15, Folate receptor CDC27, PAGE-I, and PAGE4.

[0024] The peptide epitopes of the invention have been identified in a number of ways, as will be discussed below. Also discussed in greater detail is that analog peptides have been derived and the binding activity for HLA molecules modulated by modifying specific amino acid residues to create peptide analogs exhibiting altered immunogenicity. Further, the present invention provides compositions and combinations of compositions that enable epitope-based vaccines that are capable of interacting with HLA molecules encoded by various genetic alleles to provide broader population coverage than prior vaccines.

### IV.A. DEFINITIONS

[0025] The invention can be better understood with reference to the following definitions, which are listed alphabetically:

[0026] A “computer” or “computer system” generally includes: a processor; at least one information storage/retrieval apparatus such as, for example, a hard drive, a disk drive or a tape drive; at least one input apparatus such as, for example, a keyboard, a mouse, a touch screen, or a microphone; and display structure. Additionally, the computer may include a communication channel in communication with a network. Such a computer may include more or less than what is listed above.

[0027] A “construct” as used herein generally denotes a composition that does not occur in nature. A construct can be produced by synthetic technologies, e.g., recombinant DNA preparation and expression or chemical synthetic techniques for nucleic or amino acids. A construct can also be produced by the addition or affiliation of one material with another such that the result is not found in nature in that form.

[0028] “Cross-reactive binding” indicates that a peptide is bound by more than one HLA molecule; a synonym is degenerate binding.

[0029] A “cryptic epitope” elicits a response by immunization with an isolated peptide, but the response is not cross-reactive in vitro when intact whole protein which comprises the epitope is used as an antigen.

[0030] A “dominant epitope” is an epitope that induces an immune response upon immunization with a whole native antigen (see, e.g., Sercarz, et al., Annu. Rev. Immunol. 11:729-766, 1993). Such a response is cross-reactive in vitro with an isolated peptide epitope.

[0031] With regard to a particular amino acid sequence, an “epitope” is a set of amino acid residues which is involved in recognition by a particular immunoglobulin, or in the context of T cells, those residues necessary for recognition by T cell receptor proteins and/or Major Histocompatibility Complex (MHC) receptors. In an immune system setting, in vivo or in vitro, an epitope is the collective features of a molecule, such as primary, secondary and tertiary peptide structure, and charge, that together form a site recognized by an immunoglobulin, T cell receptor or HLA molecule. Throughout this disclosure epitope and peptide are often used interchangeably. It is to be appreciated, however, that isolated or purified protein or peptide molecules larger than and comprising an epitope of the invention are still within the bounds of the invention.

[0032] It is to be appreciated that protein or peptide molecules that comprise an epitope of the invention as well as additional amino acid(s) are within the bounds of the invention. In certain embodiments, there is a limitation on the length of a peptide of the invention which is not otherwise a construct as defined herein. An embodiment that is length-limited occurs when the protein/peptide comprising an epitope of the invention comprises a region (i.e., a contiguous series of amino acids) having 100% identity with a native sequence. In order to avoid a recited definition of epitope from reading, e.g., on whole natural molecules, the length of any region that has 100% identity with a native peptide sequence is limited. Thus, for a peptide comprising an epitope of the invention and a region with 100% identity with a native peptide sequence (and which is not otherwise a construct), the region with 100% identity to a native sequence generally has a length of: less than or equal to 600 amino acids, often less than or equal to 500 amino acids, often less than or equal to 400 amino acids, often less than or equal to 250 amino acids, often less than or equal to 100 amino acids, often less than or equal to 85 amino acids, often less than or equal to 75 amino acids, often less than or equal to 65 amino acids, and often less than or equal to 50 amino acids. In certain embodiments, an “epitope” of the invention which is not a construct is comprised by a peptide having a region with less than 51 amino acids that has 100% identity to a native peptide sequence, in any increment of (50, 49, 48, 47, 46, 45, 44, 43, 42, 41, 40, 39, 38, 37, 36, 35, 34, 33, 32, 31, 30, 29, 28, 27, 26, 25, 24, 23, 22, 21, 20, 19, 18, 17, 16, 15, 14, 13, 12, 11, 10, 9, 8, 7, 6, 5) down to 5 amino acids.

[0033] Certain peptide or protein sequences longer than 600 amino acids are within the scope of the invention. Such longer sequences are within the scope of the invention so long as they do not comprise any contiguous sequence of more than 600 amino acids that have 100% identity with a native peptide sequence, or if longer than 600 amino acids, they are a construct. For any peptide that has five contiguous residues or less that correspond to a native sequence, there is no limitation on the maximal length of that peptide in order to fall within the scope of the invention. It is presently preferred that a CTL epitope of the invention be less than 600 residues long in any increment down to eight amino acid residues.

[0034] “Human Leukocyte Antigen” or “HLA” is a human class I or class II Major Histocompatibility Complex (MHC) protein (see, e.g., Stites, et al., IMMUNOLOGY, 8^{Th}ED., Lange Publishing, Los Altos, Calif., 1994).

[0035] An “HLA supertype or family”, as used herein, describes sets of HLA molecules grouped on the basis of shared peptide-binding specificities. HLA class I molecules that share somewhat similar binding affinity for peptides bearing certain amino acid motifs are grouped into HLA supertypes. The terms HLA superfamily, HLA supertype family, HLA family, and HLA xx-like molecules (where xx denotes a particular HLA type), are synonyms.

[0036] Throughout this disclosure, results are expressed in terms of “IC₅₀'s.” IC₅₀ is the concentration of peptide in a binding assay at which 50% inhibition of binding of a reference peptide is observed. Given the conditions in which the assays are run (i.e., limiting HLA proteins and labeled peptide concentrations), these values approximate K_{D} values. Assays for determining binding are described in detail, e.g., in PCT publications WO 94/20127 and WO 94/03205. It should be noted that IC₅₀ values can change, often dramatically, if the assay conditions are varied, and depending on the particular reagents used (e.g., HLA preparation, etc.). For example, excessive concentrations of HLA molecules will increase the apparent measured IC₅₀ of a given ligand.

[0037] Alternatively, binding is expressed relative to a reference peptide. Although as a particular assay becomes more, or less, sensitive, the IC₅₀'s of the peptides tested may change somewhat, the binding relative to the reference peptide will not significantly change. For example, in an assay run under conditions such that the IC₅₀ of the reference peptide increases 10-fold, the IC₅₀ values of the test peptides will also shift approximately 10-fold. Therefore, to avoid ambiguities, the assessment of whether a peptide is a good, intermediate, weak, or negative binder is generally based on its IC₅₀, relative to the IC₅₀ of a standard peptide.

[0038] Binding may also be determined using other assay systems including those using: live cells (e.g., Ceppelini et al., Nature 339:392, 1989; Christnick et al., Nature 352:67, 1991; Busch et al., Int. Immunol. 2:443, 19990; Hill et al., J. Immunol. 147:189, 1991; del Guercio et al., J. Immunol. 154:685, 1995), cell free systems using detergent lysates (e.g., Cerundolo et al., J. Immunol. 21:2069, 1991), immobilized purified MHC (e.g., Hill et al., J. Immunol. 152, 2890, 1994; Marshall et al., J. Immunol. 152:4946, 1994), ELISA systems (e.g., Reay et al., EMBO J. 11:2829, 1992), surface plasmon resonance (e.g., Khilko et al., J. Biol. Chem. 268:15425, 1993); high flux soluble phase assays (Hammer et al., J. Exp. Med. 180:2353, 1994), and measurement of class I MHC stabilization or assembly (e.g., Ljunggren et al., Nature 346:476, 1990; Schumacher et al., Cell 62:563, 1990; Townsend et al., Cell 62:285, 1990; Parker et al., J. Immunol. 149:1896, 1992).

[0039] As used herein, “high affinity” with respect to HLA class I molecules is defined as binding with an IC₅₀, or K_{D} value, of 50 nM or less; “intermediate affinity” is binding with an IC₅₀ or K_{D} value of between about 50 and about 500 nM. “High affinity” with respect to binding to HLA class II molecules is defined as binding with an IC₅₀ or K_{D} value of 100 nM or less; “intermediate affinity” is binding with an IC₅₀ or K_{D} value of between about 100 and about 1000 nM.

[0040] The terms “identical” or percent “identity,” in the context of two or more peptide sequences, refer to two or more sequences or subsequences that are the same or have a specified percentage of amino acid residues that are the same, when compared and aligned for maximum correspondence over a comparison window, as measured using a sequence comparison algorithm or by manual alignment and visual inspection.

[0041] An “immunogenic peptide” or “peptide epitope” is a peptide that comprises an allele-specific motif or supermotif such that the peptide will bind an HLA molecule and induce a CTL and/or HTL response. Thus, immunogenic peptides of the invention are capable of binding to an appropriate HLA molecule and thereafter inducing a cytotoxic T cell response, or a helper T cell response, to the antigen from which the immunogenic peptide is derived.

[0042] The phrases “isolated” or “biologically pure” refer to material which is substantially or essentially free from components which normally accompany the material as it is found in its native state. Thus, isolated peptides in accordance with the invention preferably do not contain materials normally associated with the peptides in their in situ environment.

[0043] “Link” or “join” refers to any method known in the art for functionally connecting peptides, including, without limitation, recombinant fusion, covalent bonding, disulfide bonding, ionic bonding, hydrogen bonding, and electrostatic bonding.

[0044] “Major Histocompatibility Complex” or “MHC” is a cluster of genes that plays a role in control of the cellular interactions responsible for physiologic immune responses. In humans, the MHC complex is also known as the HLA complex. For a detailed description of the MHC and HLA complexes, see, Paul, FUNDAMENTAL IMMUNOLOGY, 3^{RD}ED., Raven Press, New York, 1993.

[0045] The term “motif” refers to the pattern of residues in a peptide of defined length, usually a peptide of from about 8 to about 13 amino acids for a class I HLA motif and from about 6 to about 25 amino acids for a class II HLA motif, which is recognized by a particular HLA molecule. Peptide motifs are typically different for each protein encoded by each human HLA allele and differ in the pattern of the primary and secondary anchor residues.

[0046] A “non-native” sequence or “construct” refers to a sequence that is not found in nature, i.e., is “non-naturally occurring”. Such sequences include, e.g., peptides that are lipidated or otherwise modified, and polyepitopic compositions that contain epitopes that are not contiguous in a native protein sequence.

[0047] A “negative binding residue” or “deleterious residue” is an amino acid which, if present at certain positions (typically not primary anchor positions) in a peptide epitope, results in decreased binding affinity of the peptide for the peptide's corresponding HLA molecule.

[0048] The term “peptide” is used interchangeably with “oligopeptide” in the present specification to designate a series of residues, typically L-amino acids, connected one to the other, typically by peptide bonds between the α-amino and carboxyl groups of adjacent amino acids. The preferred CTL-inducing peptides of the invention are 13 residues or less in length and usually consist of between about 8 and about 11 residues, preferably 9 or 10 residues. The preferred HTL-inducing oligopeptides are less than about 50 residues in length and usually consist of between about 6 and about 30 residues, more usually between about 12 and 25, and often between about 15 and 20 residues.

[0049] “Pharmaceutically acceptable” refers to a generally non-toxic, inert, and/or physiologically compatible composition.

[0050] A “pharmaceutical excipient” comprises a material such as an adjuvant, a carrier, pH-adjusting and buffering agents, tonicity adjusting agents, wetting agents, preservative, and the like.

[0051] A “primary anchor residue” is an amino acid at a specific position along a peptide sequence which is understood to provide a contact point between the immunogenic peptide and the HLA molecule. One to three, usually two, primary anchor residues within a peptide of defined length generally defines a “motif” for an immunogenic peptide. These residues are understood to fit in close contact with peptide binding grooves of an HLA molecule, with their side chains buried in specific pockets of the binding grooves themselves. In one embodiment, for example, the primary anchor residues are located at position 2 (from the amino terminal position) and at the carboxyl terminal position of a 9-residue peptide epitope in accordance with the invention. The primary anchor positions for each motif and supermotif are set forth in Table 1. For example, analog peptides can be created by altering the presence or absence of particular residues in these primary anchor positions. Such analogs are used to modulate the binding affinity of a peptide comprising a particular motif or supermotif.

[0052] “Promiscuous recognition” is where a distinct peptide is recognized by the same T cell clone in the context of various HLA molecules. Promiscuous recognition or binding is synonymous with cross-reactive binding.

[0053] A “protective immune response” or “therapeutic immune response” refers to a CTL and/or an HTL response to an antigen derived from an infectious agent or a tumor antigen, which prevents or at least partially arrests disease symptoms or progression. The immune response may also include an antibody response which has been facilitated by the stimulation of helper T cells.

[0054] The term “residue” refers to an amino acid or amino acid mimetic incorporated into an oligopeptide by an amide bond or amide bond mimetic.

[0055] A “secondary anchor residue” is an amino acid at a position other than a primary anchor position in a peptide which may influence peptide binding. A secondary anchor residue occurs at a significantly higher frequency amongst bound peptides than would be expected by random distribution of amino acids at one position. The secondary anchor residues are said to occur at “secondary anchor positions.” A secondary anchor residue can be identified as a residue which is present at a higher frequency among high or intermediate affinity binding peptides, or a residue otherwise associated with high or intermediate affinity binding. For example, analog peptides can be created by altering the presence or absence of particular residues in these secondary anchor positions. Such analogs are used to finely modulate the binding affinity of a peptide comprising a particular motif or supermotif.

[0056] A “subdominant epitope” is an epitope which evokes little or no response upon immunization with whole antigens which comprise the epitope, but for which a response can be obtained by immunization with an isolated peptide, and this response (unlike the case of cryptic epitopes) is detected when whole protein is used to recall the response in vitro or in vivo.

[0057] A “supermotif” is a peptide binding specificity shared by HLA molecules encoded by two or more HLA alleles. Preferably, a supermotif-bearing peptide is recognized with high or intermediate affinity (as defined herein) by two or more HLA molecules.

[0058] “Synthetic peptide” refers to a peptide that is man-made using such methods as chemical synthesis or recombinant DNA technology.

[0059] As used herein, a “vaccine” is a composition that contains one or more peptides of the invention. There are numerous embodiments of vaccines in accordance with the invention, such as by a cocktail of one or more peptides; one or more epitopes of the invention comprised by a polyepitopic peptide; or nucleic acids that encode such peptides or polypeptides, e.g., a minigene that encodes a polyepitopic peptide. The “one or more peptides” can include any whole unit integer from 1-150, e.g., at least 2, 3, 4, 5, 6, 7, 8, 9, 10, 11, 12, 13, 14, 15, 16, 17, 18, 19, 20, 21, 22, 23, 24, 25, 26, 27, 28, 29, 30, 31, 32, 33, 34, 35, 36, 37, 38, 39, 40, 45, 50, 55, 60, 65, 70, 75, 80, 85, 90, 95, 100, 105, 110, 115, 120, 125, 130, 135, 140, 145, or 150 or more peptides of the invention. The peptides or polypeptides can optionally be modified, such as by lipidation, addition of targeting or other sequences. HLA class I-binding peptides of the invention can be admixed with, or linked to, HLA class II-binding peptides, to facilitate activation of both cytotoxic T lymphocytes and helper T lymphocytes. Vaccines can also comprise peptide-pulsed antigen presenting cells, e.g., dendritic cells.

[0060] The nomenclature used to describe peptide compounds follows the conventional practice wherein the amino group is presented to the left (the N-terminus) and the carboxyl group to the right (the C-terminus) of each amino acid residue. When amino acid residue positions are referred to in a peptide epitope they are numbered in an amino to carboxyl direction with position one being the position closest to the amino terminal end of the epitope, or the peptide or protein of which it may be a part. In the formulae representing selected specific embodiments of the present invention, the amino- and carboxyl-terminal groups, although not specifically shown, are in the form they would assume at physiologic pH values, unless otherwise specified. In the amino acid structure formulae, each residue is generally represented by standard three letter or single letter designations. The L-form of an amino acid residue is represented by a capital single letter or a capital first letter of a three-letter symbol, and the D-form for those amino acids having D-forms is represented by a lower case single letter or a lower case three letter symbol. Glycine has no asymmetric carbon atom and is simply referred to as “Gly” or G. The amino acid sequences of peptides set forth herein are generally designated using the standard single letter symbol. (A, Alanine; C, Cysteine; D, Aspartic Acid; E, Glutamic Acid; F, Phenylalanine; G, Glycine; H, Histidine; I, Isoleucine; K, Lysine; L, Leucine; M, Methionine; N, Asparagine; P, Proline; Q, Glutamine; R, Arginine; S, Serine; T, Threonine; V, Valine; W, Tryptophan; and Y, Tyrosine.) In addition to these symbols, “B” in the single letter abbreviations used herein designates α-amino butyric acid.

### IV.B. STIMULATION OF CTL AND HTL RESPONSES

[0061] The mechanism by which T cells recognize antigens has been delineated during the past ten years. Based on our understanding of the immune system we have developed efficacious peptide epitope vaccine compositions that can induce a therapeutic or prophylactic immune response to a TAA in a broad population. For an understanding of the value and efficacy of the claimed compositions, a brief review of immunology-related technology is provided. The review is intended to disclose the presently understood state of the art as of the filing date of the present application. Information is included in this section which was generated subsequent to the priority date of this application. Accordingly, information in this section is not intended, in any way, to delineate the priority date for the invention.

[0062] A complex of an HLA molecule and a peptide antigen acts as the ligand recognized by HLA-restricted T cells (Buus, S. et al., Cell 47:1071, 1986; Babbitt, B. P. et al., Nature 317:359, 1985; Townsend, A. and Bodmer, H., Annu. Rev. Immunol. 7:601, 1989; Germain, R. N., Annu. Rev. Immunol. 11:403, 1993). Through the study of single amino acid substituted antigen analogs and the sequencing of endogenously bound, naturally processed peptides, critical residues that correspond to motifs required for specific binding to HLA antigen molecules have been identified and are described herein and are set forth in Tables I, II, and III (see also, e.g., Southwood, et al., J. Immunol. 160:3363, 1998; Rammensee, et al., Immunogenetics 41:178, 1995; Rammensee et al., SYFPEITHI, access via web at: http://134.2.96.221/scripts.hlaserver.dll/home.htm; Sette, A. and Sidney, J. Curr. Opin. Immunol. 10:478, 1998; Engelhard, V. H., Curr. Opin. Immunol. 6:13, 1994; Sette, A. and Grey, H. M., Curr. Opin. Immunol. 4:79, 1992; Sinigaglia, F. and Hammer, J. Curr. Biol. 6:52, 1994; Ruppert et al., Cell 74:929-937, 1993; Kondo et al., J. Immunol. 155:4307-4312, 1995; Sidney et al., J. Immunol. 157:3480-3490, 1996; Sidney et al., Human Immunol. 45:79-93, 1996; Sette, A. and Sidney, J. Immunogenetics November 1999; 50(3-4):201-12, Review).

[0063] Furthermore, x-ray crystallographic analysis of HLA-peptide complexes has revealed pockets within the peptide binding cleft of HLA molecules which accommodate, in an allele-specific mode, residues borne by peptide ligands; these residues in turn determine the HLA binding capacity of the peptides in which they are present. (See, e.g., Madden, D. R. Annu. Rev. Immunol. 13:587, 1995; Smith, et al., Immunity 4:203, 1996; Fremont et al., Immunity 8:305, 1998; Stern et al., Structure 2:245, 1994; Jones, E. Y. Curr. Opin. Immunol. 9:75, 1997; Brown, J. H. et al., Nature 364:33, 1993; Guo, H. C. et al., Proc. Natl. Acad. Sci. USA 90:8053, 1993; Guo, H. C. et al., Nature 360:364, 1992; Silver, M. L. et al., Nature 360:367, 1992; Matsumura, M. et al., Science 257:927, 1992; Madden et al., Cell 70:1035, 1992; Fremont, D. H. et al., Science 257:919, 1992; Saper, M. A., Bjorkman, P. J. and Wiley, D. C., J. Mol. Biol. 219:277, 1991.)

[0064] Accordingly, the definition of class I and class II allele-specific HLA binding motifs, or class I or class II supermotifs allows identification of regions within a protein that have the potential of binding particular HLA molecules.

[0065] The present inventors have found that the correlation of binding affinity with immunogenicity, which is disclosed herein, is an important factor to be considered when evaluating candidate peptides. Thus, by a combination of motif searches and HLA-peptide binding assays, candidates for epitope-based vaccines have been identified. After determining their binding affinity, additional confirmatory work can be performed to select, amongst these vaccine candidates, epitopes with preferred characteristics in terms of population coverage, antigenicity, and immunogenicity.

[0066] Various strategies can be utilized to evaluate immunogenicity, including:

[0067] 1) Evaluation of primary T cell cultures from normal individuals (see, e.g., Wentworth, P. A. et al., Mol. Immunol. 32:603, 1995; Celis, E. et al., Proc. Natl. Acad Sci. USA 91:2105, 1994; Tsai, V. et al., J. Immunol. 158:1796, 1997; Kawashima, I. et al., Human Immunol. 59:1, 1998); This procedure involves the stimulation of peripheral blood lymphocytes (PBL) from normal subjects with a test peptide in the presence of antigen presenting cells in vitro over a period of several weeks. T cells specific for the peptide become activated during this time and are detected using, e.g. a ⁵¹Cr-release assay involving peptide sensitized target cells.

[0068] 2) Immunization of HLA transgenic mice (see, e.g., Wentworth, P. A. et al., J. Immunol. 26:97, 1996; Wentworth, P. A. et al., Int. Immunol. 8:651, 1996; Alexander, J. et al., J. Immunol. 159:4753, 1997); In this method, peptides in incomplete Freund's adjuvant are administered subcutaneously to HLA transgenic mice. Several weeks following immunization, splenocytes are removed and cultured in vitro in the presence of test peptide for approximately one week. Peptide-specific T cells are detected using, e.g., a ⁵¹Cr-release assay involving peptide sensitized target cells and target cells expressing endogenously generated antigen.

[0069] 3) Demonstration of recall T cell responses from patients who have been effectively vaccinated or who have a tumor; (see, e.g., Rehermann, B. et al., J. Exp. Med. 181:1047, 1995; Doolan, D. L. et al., Immunity 7:97, 1997; Bertoni, R. et al., J. Clin. Invest. 100:503, 1997; Threlkeld, S. C. et al., J. Immunol. 159:1648, 1997; Diepolder, H. M. et al., J. Virol. 71:6011, 1997; Tsang et al., J. Natl. Cancer Inst. 87:982-990, 1995; Disis et al., J. Immunol. 156:3151-3158, 1996). In applying this strategy, recall responses are detected by culturing PBL from patients with cancer who have generated an immune response “naturally”, or from patients who were vaccinated with tumor antigen vaccines. PBL from subjects are cultured in vitro for 1-2 weeks in the presence of test peptide plus antigen presenting cells (APC) to allow activation of “memory” T cells, as compared to “naive” T cells. At the end of the culture period, T cell activity is detected using assays for T cell activity including ⁵¹Cr release involving peptide-sensitized targets, T cell proliferation, or lymphokine release.

[0070] The following describes the peptide epitopes and corresponding nucleic acids of the invention.

### IV.C. BINDING AFFINITY OF PEPTIDE EPITOPES FOR HLA MOLECULES

[0071] As indicated herein, the large degree of HLA polymorphism is an important factor to be taken into account with the epitope-based approach to vaccine development. To address this factor, epitope selection encompassing identification of peptides capable of binding at high or intermediate affinity to multiple HLA molecules is preferably utilized, most preferably these epitopes bind at high or intermediate affinity to two or more allele-specific HLA molecules.

[0072] CTL-inducing peptides of interest for vaccine compositions preferably include those that have an IC₅₀ or binding affinity value for class I HLA molecules of 500 nM or better (i.e., the value is ≦500 nM). HTL-inducing peptides preferably include those that have an IC₅₀ or binding affinity value for class II HLA molecules of 1000 nM or better, (i.e., the value is ≦1,000 nM). For example, peptide binding is assessed by testing the capacity of a candidate peptide to bind to a purified HLA molecule in vitro. Peptides exhibiting high or intermediate affinity are then considered for further analysis. Selected peptides are tested on other members of the supertype family. In preferred embodiments, peptides that exhibit cross-reactive binding are then used in cellular screening analyses or vaccines.

[0073] As disclosed herein, higher HLA binding affinity is correlated with greater immunogenicity. Greater immunogenicity can be manifested in several different ways. Immunogenicity corresponds to whether an immune response is elicited at all, and to the vigor of any particular response, as well as to the extent of a population in which a response is elicited. For example, a peptide might elicit an immune response in a diverse array of the population, yet in no instance produce a vigorous response. Moreover, higher binding affinity peptides lead to more vigorous immunogenic responses. As a result, less peptide is required to elicit a similar biological effect if a high or intermediate affinity binding peptide is used. Thus, in preferred embodiments of the invention, high or intermediate affinity binding epitopes are particularly useful.

[0074] The relationship between binding affimity for HLA class I molecules and immunogenicity of discrete peptide epitopes on bound antigens has been determined for the first time in the art by the present inventors. The correlation between binding affinity and immunogenicity was analyzed in two different experimental approaches (see, e.g., Sette, et al., J. Immunol. 153:5586-5592, 1994). In the first approach, the immunogenicity of potential epitopes ranging in HLA binding affinity over a 10,000-fold range was analyzed in HLA-A*0201 transgenic mice. In the second approach, the antigenicity of approximately 100 different hepatitis B virus (HBV)-derived potential epitopes, all carrying A*0201 binding motifs, was assessed by using PBL from acute hepatitis patients. Pursuant to these approaches, it was determined that an affinity threshold value of approximately 500 nM (preferably 50 nM or less) determines the capacity of a peptide epitope to elicit a CTL response. These data are true for class I binding affinity measurements for naturally processed peptides and for synthesized T cell epitopes. These data also indicate the important role of determinant selection in the shaping of T cell responses (see, e.g., Schaeffer et al., Proc. Natl. Acad. Sci. USA 86:4649-4653, 1989).

[0075] An affinity threshold associated with immunogenicity in the context of HLA class II DR molecules has also been delineated (see, e.g., Southwood et al. J. Immunology 160:3363-3373,1998, and co-pending U.S. Ser. No. 09/009,953 filed Jan. 21, 1998). In order to defined a biologically significant threshold of DR binding affinity, a database of the binding affinities of 32 DR-restricted epitopes for their restricting element (ie., the HLA molecule that binds the motif) was compiled. In approximately half of the cases (15 of 32 epitopes), DR restriction was associated with high binding affinities, ie. binding affinity values of 100 nM or less. In the other half of the cases (16 of 32), DR restriction was associated with intermediate affimity (binding affinity values in the 100-1000 nM range). In only one of 32 cases was DR restriction associated with an IC₅₀ of 1000 nM or greater. Thus, 1000 nM can be defined as an affinity threshold associated with immunogenicity in the context of DR molecules.

[0076] In the case of tumor-associated antigens, many CTL peptide epitopes that have been shown to induce CTL that lyse peptide-pulsed target cells and tumor cell targets endogenously expressing the epitope exhibit binding affimity or IC₅₀ values of 200 nM or less. In a study that evaluated the association of binding affinity and immunogenicity of such TAA epitopes, 100% (10/10) of the high binders, ie., peptide epitopes binding at an affinity of 50 nM or less, were immunogenic and 80% (8/10) of them elicited CTLs that specifically recognized tumor cells. In the 51 to 200 nM range, very similar figures were obtained. CTL inductions positive for peptide and tumor cells were noted for 86% (6/7) and 71% (5/7) of the peptides, respectively. In the 201-500 nM range, most peptides (⅘ wildtype) were positive for induction of CTL recognizing wildtype peptide, but tumor recognition was not detected.

[0077] The binding affinity of peptides for HLA molecules can be determined as described in Example 1, below.

### IV.D. PEPTIDE EPITOPE BINDING MOTIFS AND SUPERMOTIFS

[0078] Through the study of single amino acid substituted antigen analogs and the sequencing of endogenously bound, naturally processed peptides, critical residues required for allele-specific binding to HLA molecules have been identified. The presence of these residues correlates with binding affinity for HLA molecules. The identification of motifs and/or supermotifs that correlate with high and intermediate affinity binding is an important issue with respect to the identification of immunogenic peptide epitopes for the inclusion in a vaccine. Kast et al. (J. Immunol. 152:3904-3912, 1994) have shown that motif-bearing peptides account for 90% of the epitopes that bind to allele-specific HLA class I molecules. In this study all possible peptides of 9 amino acids in length and overlapping by eight amino acids (240 peptides), which cover the entire sequence of the E6 and E7 proteins of human papillomavirus type 16, were evaluated for binding to five allele-specific HLA molecules that are expressed at high frequency among different ethnic groups. This unbiased set of peptides allowed an evaluation of the predictive value of HLA class I motifs. From the set of 240 peptides, 22 peptides were identified that bound to an allele-specific HLA molecule with high or intermediate affinity. Of these 22 peptides, 20 (ie. 91%) were motif-bearing. Thus, this study demonstrates the value of motifs for the identification of peptide epitopes for inclusion in a vaccine: application of motif-based identification techniques will identify about 90% of the potential epitopes in a target antigen protein sequence.

[0079] Such peptide epitopes are identified in the Tables described below.

[0080] Peptides of the present invention also comprise epitopes that bind to MHC class II DR molecules. A greater degree of heterogeneity in both size and binding frame position of the motif, relative to the N and C termini of the peptide, exists for class II peptide ligands. This increased heterogeneity of HLA class II peptide ligands is due to the structure of the binding groove of the HLA class II molecule which, unlike its class I counterpart, is open at both ends. Crystallographic analysis of HLA class II DRB*0101-peptide complexes showed that the major energy of binding is contributed by peptide residues complexed with complementary pockets on the DRB*0101 molecules. An important anchor residue engages the deepest hydrophobic pocket (see, e.g., Madden, D. R. Ann. Rev. Immunol. 13:587, 1995) and is referred to as position 1 (P1). P1 may represent the N-terminal residue of a class II binding peptide epitope, but more typically is flanked towards the N-terminus by one or more residues. Other studies have also pointed to an important role for the peptide residue in the 6^{th} position towards the C-terminus, relative to P1, for binding to various DR molecules.

[0081] In the past few years evidence has accumulated to demonstrate that a large fraction of HLA class I and class II molecules can be classified into a relatively few supertypes, each characterized by largely overlapping peptide binding repertoires, and consensus structures of the main peptide binding pockets. Thus, peptides of the present invention are identified by any one of several HLA-specific amino acid motifs (see, e.g., Tables I-III), or if the presence of the motif corresponds to the ability to bind several allele-specific HLA molecules, a supermotif. The HLA molecules that bind to peptides that possess a particular amino acid supermotif are collectively referred to as an HLA “supertype.”

[0082] The peptide motifs and supermotifs described below, and summarized in Tables I-III, provide guidance for the identification and use of peptide epitopes in accordance with the invention.

[0083] Examples of peptide epitopes bearing a respective supermotif or motif are included in Tables as designated in the description of each motif or supermotif below. The Tables include a binding affinity ratio listing for some of the peptide epitopes. The ratio may be converted to IC₅₀ by using the following formula: IC₅₀ of the standard peptide/ratio=IC₅₀ of the test peptide (i.e., the peptide epitope). The IC₅₀ values of standard peptides used to determine binding affinities for Class I peptides are shown in Table IV. The IC₅₀ values of standard peptides used to determiine binding affinities for Class II peptides are shown in Table V. The peptides used as standards for the binding assays described herein are examples of standards; alternative standard peptides can also be used when performing binding studies.

[0084] To obtain the peptide epitope sequences listed in each of Tables VII-XX, the amino acid sequences of MAGE2 and MAGE3 were evaluated for the presence of the designated supermotif or motif, i.e., the amino acid sequences were searched for the presence of the primary anchor residues as set out in Table I (for Class I motifs) or Table III (for Class II motifs) for each respective motif or supermotif.

[0085] In the Tables, motif- and/or supermotif-bearing amino acid sequences are indicated by position number and length of the epitope with reference to the MAGE2 and MAGE3 sequences and numbering provided below. The “pos” (position) column designates the amino acid position in the MAGE2 or MAGE3 protein sequence that corresponds to the first amino acid residue of the epitope. The “number of amino acids” indicates the number of residues in the epitope sequence and hence the length of the epitope. For example, the first peptide epitope listed in Table VIIA is a sequence of 9 residues in length starting at position 154 of the MAGE2 amino acid sequence. Accordingly, the amino acid sequence of the epitope is ASEYLQLVF.

[0086] Binding data presented in Tables VII-XX is expressed as a relative binding ratio, supra.

| MAGE2 Amino Acid Sequence | | |
|---|---|---|
| 1 | MPLEQRSQHC KPEEGLEARG EALGLVGAQA PATEEQQTAS SSSTLVEVTL GEVPAADSPS | 60 |
| | PPHSPQGASS FSTTINYTLW RQSDEGSSNQ EEEGPRMFPD LESEFQAAIS RKMVELVHFL | 120 |
| | LLKYRAREPV TKAEMLESVL RNCQDFFPVI FSKASEYLQL VFGIEVVEVV PISHLYILVT | 180 |
| | CLGLSYDGLL GDNQVMPKTG LLIIVLAIIA IEGDCAPEEK IWEELSMLEV FEGREDSVFA | 240 |
| | HPRKLLMQDL VQENYLEYRQ VPGSDPACYE FLWGPRALIE TSYVKVLHHT LKIGGEPHIS | 300 |
| | YPPLHERALR EGEE 314 | |
| MAGE3 Amino Acid Sequence | | |
| 1 | MPLEQRSQHC KPEEGLEARG EALGLVGAQA PATEEQEAAS SSSTLVEVTL GEVPAAESPD | 60 |
| | PPQSPQGASS LPTTMNYPLW SQSYEDSSNQ EEEGPSTFPD LESEFQAALS RKVAELVHFL | 120 |
| | LLKYRAREPV TKAEMLGSVV GNWQYFFPVI FSKASSSLQL VFGIELMEVD PIGHLYIFAT | 180 |
| | CLGLSYDGLL GDNQIMPKAG LLIIVLAIIA REGDCAPEEK IWEELSVLEV FEGREDSILG | 240 |
| | DPKKLLTQHF VQENYLEYRQ VPGSDPACYE FLWGPRALVE TSYVKVLHHM VKISGGPHIS | 300 |
| | YPPLHEWVLR EGEE 314 | |

[0087] HLA Class I Motifs Indicative of CTL Inducing Peptide Epitopes:

[0088] The primary anchor residues of the HLA class I peptide epitope supermotifs and motifs delineated below are summarized in Table I. The HLA class I motifs set out in Table I(a) are those most particularly relevant to the invention claimed here. Primary and secondary anchor positions are summarized in Table II. Allele-specific HLA molecules that comprise HLA class I supertype families are listed in Table VI. In some cases, peptide epitopes may be listed in both a motif and a supermotif Table. The relationship of a particular motif and respective supermotif is indicated in the description of the individual motifs.

### IV.D.1. HLA-A1 SUPERMOTIF

[0089] The HLA-A1 supermotif is characterized by the presence in peptide ligands of a small (T or S) or hydrophobic (L, I, V, or M) primary anchor residue in position 2, and an aromatic (Y, F, or W) primary anchor residue at the C-terminal position of the epitope. The corresponding family of HLA molecules that bind to the A1 supermotif (i.e., the HLA-A1 supertype) is comprised of at least: A*0101, A*2601, A*2602, A*2501, and A*3201 (see, e.g., DiBrino, M. et al., J. Immunol. 151:5930, 1993; DiBrino, M. et al., J. Immunol. 152:620, 1994; Kondo, A. et al., Immunogenetics 45:249, 1997). Other allele-specific HLA molecules predicted to be members of the A1 superfamily are shown in Table VI. Peptides binding to each of the individual HLA proteins can be modulated by substitutions at primary and/or secondary anchor positions, preferably choosing respective residues specified for the supermotif.

[0090] Representative MAGE2 and MAGE3 peptide epitopes that comprise the A1 supermotif are set forth in Tables VII(A) and VII(B), respectively.

### IV.D.2. HLA-A2 SUPERMOTIF

[0091] Primary anchor specificities for allele-specific HLA-A2.1 molecules (see, e.g., Falk et al., Nature 351:290-296, 1991; Hunt et al., Science 255:1261-1263, 1992; Parker et al., J. Immunol. 149:3580-3587, 1992; Ruppert et al., Cell 74:929-937, 1993) and cross-reactive binding among HLA-A2 and -A28 molecules have been described. (See, e.g., Fruci et al., Human Immunol. 38:187-192, 1993; Tanigaki et al., Human Immunol 39:155-162, 1994; Del Guercio et al., J. Immunol. 154:685-693, 1995; Kast et al., J. Immunol. 152:3904-3912, 1994 for reviews of relevant data.) These primary anchor residues define the HLA-A2 supermotif; which presence in peptide ligands corresponds to the ability to bind several different HLA-A2 and -A28 molecules. The HLA-A2 supermotif comprises peptide ligands with L, I, V, M, A, T, or Q as a primary anchor residue at position 2 and L, I, V, M, A, or T as a primary anchor residue at the C-terminal position of the epitope.

[0092] The corresponding family of HLA molecules (ie., the HLA-A2 supertype that binds these peptides) is comprised of at least: A*0201, A*0202, A*0203, A*0204, A*0205, A*0206, A*0207, A*0209, A*0214, A*6802, and A*6901. Other allele-specific HLA molecules predicted to be members of the A2 superfamily are shown in Table VI. As explained in detail below, binding to each of the individual allele-specific HLA molecules can be modulated by substitutions at the primary anchor and/or secondary anchor positions, preferably choosing respective residues specified for the supermotif.

[0093] Representative MAGE2 and MAGE3 peptide epitopes that comprise the A2 supermotif are set forth in Tables VIII(A) and VIII(B), respectively. The motifs comprising the primary anchor residues V, A, T, or Q at position 2 and L, I, V, A, or T at the C-terminal position are those most particularly relevant to the invention claimed herein.

### IV.D.3. HLA-A3 SUPERMOTIF

[0094] The HLA-A3 supermotif is characterized by the presence in peptide ligands of A, L, I, V, M, S, or, T as a primary anchor at position 2, and a positively charged residue, R or K, at the C-terminal position of the epitope, e.g., in position 9 of 9-mers (see, e.g., Sidney et al., Hum. Immunol. 45:79, 1996). Exemplary members of the corresponding family of HLA molecules (the HLA-A3 supertype) that bind the A3 supermotif include at least: A*0301, A*1101, A*3101, A*3301, and A*6801. Other allele-specific HLA molecules predicted to be members of the A3 supertype are shown in Table VI. As explained in detail below, peptide binding to each of the individual allele-specific HLA proteins can be modulated by substitutions of amino acids at the primary and/or secondary anchor positions of the peptide, preferably choosing respective residues specified for the supermotif.

[0095] Representative MAGE2 and MAGE3 peptide epitopes that comprise the A3 supermotif are set forth in Tables IX(A) and IX(B), respectively.

### IV.D.4. HLA-A24 SUPERMOTIF

[0096] The HLA-A24 supermotif is characterized by the presence in peptide ligands of an aromatic (F, W, or Y) or hydrophobic aliphatic (L, I, V, M, or T) residue as a primary anchor in position 2, and Y, F, W, L, 1, or M as primary anchor at the C-terminal position of the epitope (see, e.g., Sette and Sidney, Immunogenetics November 1999; 50(3-4):201-12, Review). The corresponding family of HLA molecules that bind to the A24 supermotif (i.e., the A24 supertype) includes at least: A*2402, A*3001, and A*2301. Other allele-specific HLA molecules predicted to be members of the A24 supertype are shown in Table VI. Peptide binding to each of the allele-specific HLA molecules can be modulated by substitutions at primary and/or secondary anchor positions, preferably choosing respective residues specified for the supermotif.

[0097] Representative MAGE2 and MAGE3 peptide epitopes that comprise the A24 supermotif are set forth in Tables X(A) and X(B), respectively.

### IV.D.5. HLA-B7 SUPERMOTIF

[0098] The HLA-B7 supermotif is characterized by peptides bearing proline in position 2 as a primary anchor, and a hydrophobic or aliphatic amino acid (L, I, V, M, A, F, W, or Y) as the primary anchor at the C-terminal position of the epitope. The corresponding family of HLA molecules that bind the B7 supermotif (i.e., the HLA-B7 supertype) is comprised of at least twenty six HLA-B proteins comprising at least: B*0702, B*0703, B*0704, B*0705, B*1508, B*3501, B*3502, B*3503, B*3504, B*3505, B*3506, B*3507, B*3508, B*5101, B*5102, B*5103, B*5104, B*5105, B*5301, B*5401, B*5501, B*5502, B*5601, B*5602, B*6701, and B*7801 (see, e.g., Sidney, et al., J. Immunol. 154:247, 1995; Barber, et al., Curr. Biol. 5:179, 1995; Hill, et al., Nature 360:434, 1992; Rammenesee, et al., Immunogenetics 41:178, 1995 for reviews of relevant data). Other allele-specific HLA molecules predicted to be members of the B7 supertype are shown in Table VI. As explained in detail below, peptide binding to each of the individual allele-specific HLA proteins can be modulated by substitutions at the primary and/or secondary anchor positions of the peptide, preferably choosing respective residues specified for the supermotif.

[0099] Representative MAGE2 and MAGE3 peptide epitopes that comprise the B7 supermotif are set forth in Tables XI(A) and XI(B), respectively.

### IV.D.6. HLA-B27 SUPERMOTIF

[0100] The HLA-B27 supermotif is characterized by the presence in peptide ligands of a positively charged (R, H, or K) residue as a primary anchor at position 2, and a hydrophobic (F, Y, L, W, M, I, A, or V) residue as a primary anchor at the C-terminal position of the epitope (see, e.g., Sidney and Sette, Immunogenetics November 1999; 50(3-4):201-12, Review). Exemplary members of the corresponding family of HLA molecules that bind to the B27 supermotif (i.e., the B27 supertype) include at least B* 1401, B*1402, B*1509,1B*2702, B*2703,1B*2704, B*2705,1B*2706, B*3801, B*3901, B*3902, and B*7301. Other allele-specific HLA molecules predicted to be members of the B27 supertype are shown in Table VI. Peptide binding to each of the allele-specific HLA molecules can be modulated by substitutions at primary and/or secondary anchor positions, preferably choosing respective residues specified for the supermotif.

[0101] Representative MAGE2 and MAGE3 peptide epitopes that comprise the B27 supermotif are set forth in Tables XII(A) and XII(B), respectively.

### IV.D.7. HLA-B44 SUPERMOTIF

[0102] The HLA-B44 supermotif is characterized by the presence in peptide ligands of negatively charged (D or E) residues as a primary anchor in position 2, and hydrophobic residues (F, W, Y, L, I, M, V, or A) as a primary anchor at the C-terminal position of the epitope (see, e.g., Sidney et al., Immunol. Today 17:261, 1996). Exemplary members of the corresponding family of HLA molecules that bind to the B44 supermotif (i.e., the B44 supertype) include at least: B*1801, B*1802, B*3701, B*4001, B*4002, B*4006, B*4402 B*4403, and B*4404. Peptide binding to each of the allele-specific HLA molecules can be modulated by substitutions at primary and/or secondary anchor positions; preferably choosing respective residues specified for the supermotif.

### IV.D.8. HLA-B58 SUPERMOTIF

[0103] The HLA-B58 supermotif is characterized by the presence in peptide ligands of a small aliphatic residue (A, S, or T) as a primary anchor residue at position 2, and an aromatic or hydrophobic residue (F, W, Y, L, I, V, M, or A) as a primary anchor residue at the C-termiinal position of the epitope (see, e.g., Sidney and Sette, Immunogenetics November 1999; 50(3-4):201-12, Review). Exemplary members of the corresponding family of HLA molecules that bind to the B58 supermotif (i.e., the B58 supertype) include at least: B*1516, B*1517, B*5701, B*5702, and B*5801. Other allele-specific HLA molecules predicted to be members of the B58 supertype are shown in Table VI. Peptide binding to each of the allele-specific HLA molecules can be modulated by substitutions at primary and/or secondary anchor positions, preferably choosing respective residues specified for the supermotif.

[0104] Representative MAGE2 and MAGE3 peptide epitopes that comprise the B58 supermotif are set forth in Tables XIII(A) and XIII(B), respectively.

### IV.D.9. HLA-B62 SUPERMOTIF

[0105] The HLA-B62 supermotif is characterized by the presence in peptide ligands of the polar aliphatic residue Q or a hydrophobic aliphatic residue (L, V, M, I, or P) as a primary anchor in position 2, and a hydrophobic residue (F, W, Y, M, I, V, L, or A) as a primary anchor at the C-terminal position of the epitope (see, e.g., Sidney and Sette, Immunogenetics November 1999; 50(3-4):201-12, Review). Exemplary members of the corresponding family of HLA molecules that bind to the B62 supermotif (i.e., the B62 supertype) include at least: B*1501, B*1502, B*1513, and B5201. Other allele-specific HLA molecules predicted to be members of the B62 supertype are shown in Table VI. Peptide binding to each of the allele-specific HLA molecules can be modulated by substitutions at primary and/or secondary anchor positions, preferably choosing respective residues specified for the supermotif.

[0106] Representative MAGE2 and MAGE3 peptide epitopes that comprise the B62 supermotif are set forth in Tables XIV(A) and XIV(B), respectively.

### IV.D.10. HLA-A1 MOTIF

[0107] The HLA-A1 motif is characterized by the presence in peptide ligands of T, S, or M as a primary anchor residue at position 2 and the presence of Y as a primary anchor residue at the C-terminal position of the epitope. An alternative allele-specific AI motif is characterized by a primary anchor residue at position 3 rather than position 2. This motif is characterized by the presence of D, E, A, or S as a primary anchor residue in position 3, and a Y as a primary anchor residue at the C-terminal position of the epitope (see, e.g., DiBrino et al., J. Immunol., 152:620, 1994; Kondo et al., Immunogenetics 45:249, 1997; and Kubo et al., J. Immunol. 152:3913, 1994 for reviews of relevant data). Peptide binding to HLA-A1 can be modulated by substitutions at primary and/or secondary anchor positions, preferably choosing respective residues specified for the motif.

[0108] Representative peptide epitopes that comprise either A1 motif are set forth in Table XV(A and B), MAGE2 and MAGE3, respectively. Those epitopes comprising T, S, or M at position 2 and Y at the C-terminal position are also included in the listing of HLA-A1 supermotif-bearing peptide epitopes listed in Table VII, as these residues are a subset of the A1 supermotif primary anchors.

### IV.D.11. HLA-A*0201 MOTIF

[0109] An HLA-A2*0201 motif was determined to be characterized by the presence in peptide ligands of L or M as a primary anchor residue in position 2, and L or V as a primary anchor residue at the C-terminal position of a 9-residue peptide (see, e.g., Falk et al., Nature 351:290-296, 1991) and was further found to comprise an I at position 2 and I or A at the C-terminal position of a nine amino acid peptide (see, e.g., Hunt et al., Science 255:1261-1263, Mar. 6, 1992; Parker et al., J. Immunol. 149:3580-3587, 1992). The A*0201 allele-specific motif has also been defined by the present inventors to additionally comprise V, A, T, or Q as a primary anchor residue at position 2, and M or T as a primary anchor residue at the C-terminal position of the epitope (see, e.g., Kast et al., J. Immunol. 152:3904-3912, 1994). Thus, the HLA-A*0201 motif comprises peptide ligands with L, I, V, M, A, T, or Q as primary anchor residues at position 2 and L, I, V, M, A, or T as a primary anchor residue at the C-terminal position of the epitope. The preferred and tolerated residues that characterize the primary anchor positions of the HLA-A*0201 motif are identical to the residues describing the A2 supermotif. (For reviews of relevant data, see, e.g., del Guercio et al., J. Immunol. 154:685-693, 1995; Ruppert et al., Cell 74:929-937, 1993; Sidney et al., Immunol. Today 17:261-266, 1996; Sette and Sidney, Curr. Opin. in Immunol. 10:478-482, 1998). Secondary anchor residues that characterize the A*0201 motif have additionally been defined (see, e.g., Ruppert et al., Cell 74:929-937, 1993). These are shown in Table II. Peptide binding to HLA-A*0201 molecules can be modulated by substitutions at primary and/or secondary anchor positions, preferably choosing respective residues specified for the motif.

[0110] Representative peptide epitopes that comprise an A*0201 motif are set forth in Table VIII(A and B), MAGE2 and MAGE3, respectively. The A*0201 motifs comprising the primary anchor residues V, A, T, or Q at position 2 and L, 1, V, A, or T at the C-terminal position are those most particularly relevant to the invention claimed herein.

### IV.D.12. HLA-A3 MOTIF

[0111] The HLA-A3 motif is characterized by the presence in peptide ligands of L, M, V, I, S, A, T, F, C, G, or D as a primary anchor residue at position 2, and the presence of K, sY, R, H, F, or A as a primary anchor residue at the C-terminal position of the epitope (see, e.g., DiBrino et al., Proc. Natl. Acad. Sci USA 90:1508, 1993; and Kubo et al., J. Immunol. 152:3913-3924, 1994). Peptide binding to HLA-A3 can be modulated by substitutions at primary and/or secondary anchor positions, preferably choosing respective residues specified for the motif.

[0112] Representative peptide epitopes that comprise the A3 motif are set forth in Table XVI(A and B), MAGE2 and MAGE3, respectively. Those peptide epitopes that also comprise the A3 supermotif are also listed in Table IX. The A3 supermotif primary anchor residues comprise a subset of the A3- and A11-allele specific motif primary anchor residues.

### IV.D.13. HLA-A11 MOTIF

[0113] The HLA-A 11 motif is characterized by the presence in peptide ligands of V, T, M, L, I, S, A, G, N, C, D, or F as a primary anchor residue in position 2, and K, R, Y, or H as a primary anchor residue at the C-terminal position of the epitope (see, e.g., Zhang et al., Proc. Natl. Acad. Sci USA 90:2217-2221, 1993; and Kubo et al., J. Immunol. 152:3913-3924, 1994). Peptide binding to HLA-A11 can be modulated by substitutions at primary and/or secondary anchor positions, preferably choosing respective residues specified for the motif.

[0114] Representative peptide epitopes that comprise the A11 motif are set forth in Table XVII(A and B), MAGE2 and MAGE3, respectively; peptide epitopes comprising the A3 allele-specific motif are also present in this Table because of the extensive overlap between the A3 and A11 motif primary anchor specificities. Further, those peptide epitopes that comprise the A3 supermotif are also listed in Table IX.

### IV.D.14. HLA-A24 MOTIF

[0115] The HLA-A24 motif is characterized by the presence in peptide ligands of Y, F, W, or M as a primary anchor residue in position 2, and F, L, I, or W as a primary anchor residue at the C-terminal position of the epitope (see, e.g., Kondo et al., J. Immunol. 155:4307-4312, 1995; and Kubo et al., J. Immunol. 152:3913-3924, 1994). Peptide binding to HLA-A24 molecules can be modulated by substitutions at primary and/or secondary anchor positions; preferably choosing respective residues specified for the motif.

[0116] Representative peptide epitopes that comprise the A24 motif are set forth in Table XVIII(A and B), MAGE2 and MAGE3, respectively. These epitopes are also listed in Table X, which sets forth HLA-A24-supermotif-bearing peptide epitopes, as the primary anchor residues characterizing the A24 allele-specific motif comprise a subset of the A24 supermotif primary anchor residues.

[0117] Motifs Indicative of Class II HTL Inducing Peptide Epitopes

[0118] The primary and secondary anchor residues of the HLA class H peptide epitope supermotifs and motifs delineated below are summarized in Table III.

[0119] IV.D.15. HLADR-14-7SUPERMOTIF

[0120] Motifs have also been identified for peptides that bind to three common HLA class II allele-specific HLA molecules: HLA DRB1*0401, DRB1*0101, and DRB1*0701 (see, e.g., the review by Southwood et al. J. Immunology 160:3363-3373,1998). Collectively, the common residues from these motifs delineate the HLA DR-1-4-7 supennotif. Peptides that bind to these DR molecules carry a supermotif characterized by a large aromatic or hydrophobic residue (Y, F, W, L, I, V, or M) as a primary anchor residue in position 1, and a small, non-charged residue (S, T, C, A, P, V, I, L, or M) as a primary anchor residue in position 6 of a 9-mer core region. Allele-specific secondary effects and secondary anchors for each of these HLA types have also been identified (Southwood et al., supra). These are set forth in Table III. Peptide binding to HLA-DRB1*0401, DRB1*0101, and/or DRB1*0701 can be modulated by substitutions at primary and/or secondary anchor positions, preferably choosing respective residues specified for the supermotif.

[0121] Potential epitope 9-mer core regions comprising the DR-1-4-7 supermotif, wherein position 1 of the supermotif is at position 1 of the nine-residue core, are set forth in Table XIX. Respective exemplary peptide epitopes of 15 amino acid residues in length, each of which comprise a c nine residue core, are also shown in the Table, along with cross-reactive binding data for the exemplary 15-residue supermotif-bearing peptides.

[0122] IV.D.16. HLA DR3 MOTIFS

[0123] Two alternative motifs (i.e., submotifs) characterize peptide epitopes that bind to HLA-DR3 molecules (see, e.g., Geluk et al., J. Immunol. 152:5742, 1994). In the first motif (submotif DR3a) a large, hydrophobic residue (L, I, V, M, F, or Y) is present in anchor position 1 of a 9-mer core, and D is present as an anchor at position 4, towards the carboxyl terminus of the epitope. As in other class II motifs, core position 1 may or may not occupy the peptide N-terminal position.

[0124] The alternative DR3 submotif provides for lack of the large, hydrophobic residue at anchor position 1, and/or lack of the negatively charged or amide-like anchor residue at position 4, by the presence of a positive charge at position 6 towards the carboxyl terminus of the epitope. Thus, for the alternative allele-specific DR3 motif (submotif DR3b): L, I, V, M, F, Y, A, or Y is present at anchor position 1; D, N, Q, E, S, or T is present at anchor position 4; and K, R, or H is present at anchor position 6. Peptide binding to HLA-DR3 can be modulated by substitutions at primary and/or secondary anchor positions, preferably choosing respective residues specified for the motif.

[0125] Potential peptide epitope 9-mer core regions corresponding to a nine residue sequence comprising the DR3a submotif (wherein position 1 of the motif is at position 1 of the nine residue core) are set forth in Table XXa. Respective exemplary peptide epitopes of 15 amino acid residues in length, each of which comprise a nine residue core, are also shown in Table XXa along with binding data of the exemplary DR3 submotif a-bearing peptides.

[0126] Potential peptide epitope 9-mer core regions comprising the DR3b submotif and respective exemplary 15-mer peptides comprising the DR3 submotif-b epitope are set forth in Table XXb. Binding data of exemplary DR3 submotif b-bearing peptides is also shown.

[0127] Each of the HLA class I or class R peptide epitopes set out in the Tables herein are deemed singly to be an inventive aspect of this application. Further, it is also an inventive aspect of this application that each peptide epitope may be used in combination with any other peptide epitope.

[0128] IV.E. ENHANCING POPULATIOIN COVERAGE OF THE VACCINE

[0129] Vaccines that have broad population coverage are preferred because they are more commercially viable and generally applicable to the most people. Broad population coverage can be obtained using the peptides of the invention (and nucleic acid compositions that encode such peptides) through selecting peptide epitopes that bind to HLA alleles which, when considered in total, are present in most of the population. Table XXI lists the overall frequencies of the HLA class I supertypes in various ethnicities (Table XXIa) and the combined population coverage achieved by the A2-, A3-, and B7-supertypes (Table XXIb). The A2-, A3-, and B7 supertypes are each present on the average of over 40% in each of these five major ethnic groups. Coverage in excess of 80% is achieved with a combination of these supermotifs. These results suggest that effective and non-ethnically biased population coverage is achieved upon use of a limited number of cross-reactive peptides. Although the population coverage reached with these three main peptide specificities is high, coverage can be expanded to reach 95% population coverage and above, and more easily achieve truly multispecific responses upon use of additional supermotif or allele-specific motif bearing peptides.

[0130] The B44-, A1-, and A24-supertypes are each present, on average, in a range from 25% to 40% in these major ethnic populations (Table XX=a). While less prevalent overall, the B27-, B58-, and B62 supertypes are each present with a frequency >25% in at least one major ethnic group (Table XXIa). Table XXIb summarizes the estimated prevalence of combinations of HLA supertypes that have been identified in five major ethnic groups. The incremental coverage obtained by the inclusion of A1,- A24, and B44-supertypes to the A2, A3, and B7 coverage and coverage obtained with all of the supertypes described herein, is shown.

[0131] The data presented herein, together with the previous definition of the A2-, A3-, and B7-supertypes, indicates that all antigens, with the possible exception of A29, B8, and B46, can be classified into a total of nine HLA supertypes. By including epitopes from the six most frequent supertypes, an average population coverage of 99% is obtained for five major ethnic groups.

[0132] IV.F. IMMUNE RESPONSE-STIMULATING PEPTIDE ANALOGS

[0133] In general, CTL and HTL responses are not directed against all possible epitopes. Rather, they are restricted to a few “immunodominant” determinants (Zinkernagel, et al., Adv. Immunol. 27:5159, 1979; Bennink, et al., J. Exp. Med. 168:19351939, 1988; Rawle, et al., J. Immunol. 146:3977-3984, 1991). It has been recognized that immunodominance (Benacerraf, et al., Science 175:273-279, 1972) could be explained by either the ability of a given epitope to selectively bind a particular HLA protein (determinant selection theory) (Vitiello, et al., J. Immunol. 131:1635, 1983); Rosenthal, et al., Nature 267:156-158, 1977), or to be selectively recognized by the existing TCR (T cell receptor) specificities (repertoire theory) (Klein, J., IMMUNOLOGY, THE SCIENCE OF SELF/NONSELF DISCRIMINATION, John Wiley & Sons, New York, pp. 270-310, 1982). It has been demonstrated that additional factors, mostly linked to processing events, can also play a key role in dictating, beyond strict immunogenicity, which of the many potential determinants will be presented as immunodominant (Sercarz, et al., Annu. Rev. Immunol. 11:729-766, 1993).

[0134] Because tissue specific and developmental TAAs are expressed on normal tissue at least at some point in time or location within the body, it may be expected that T cells to them, particularly dominant epitopes, are eliminated during immunological surveillance and that tolerance is induced. However, CTL responses to tumor epitopes in both normal donors and cancer patient has been detected, which may indicate that tolerance is incomplete (see, e.g., Kawashima et al., Hum. Immunol. 59:1, 1998; Tsang, J. Natl. Cancer Inst. 87:82-90, 1995; Rongcun et al., J. Immunol. 163:1037, 1999). Thus, immune tolerance does not completely eliminate or inactivate CTL precursors capable of recognizing high affinity HLA class I binding peptides.

[0135] An additional strategy to overcome tolerance is to use analog peptides. Without intending to be bound by theory, it is believed that because T cells to dominant epitopes may have been clonally deleted, selecting subdominant epitopes may allow existing T cells to be recruited, which will then lead to a therapeutic or prophylactic response. However, the binding of HLA molecules to subdominant epitopes is often less vigorous than to dominant ones. Accordingly, there is a need to be able to modulate the binding affinity of particular immunogenic epitopes for one or more HLA molecules, and thereby to modulate the immune response elicited by the peptide, for example to prepare analog peptides which elicit a more vigorous response.

[0136] Although peptides with suitable cross-reactivity among all alleles of a superfamily are identified by the screening procedures described above, cross-reactivity is not always as complete as possible, and in certain cases procedures to increase cross-reactivity of peptides can be useful; moreover, such procedures can also be used to modify other properties of the peptides such as binding affinity or peptide stability. Having established the general rules that govern cross-reactivity of peptides for HLA alleles within a given motif or supermotif, modification (i.e., analoging) of the structure of peptides of particular interest in order to achieve broader (or otherwise modified) HLA binding capacity can be performed. More specifically, peptides which exhibit the broadest cross-reactivity patterns, can be produced in accordance with the teachings herein. The present concepts related to analog generation are set forth in greater detail in co-pending U.S. Ser. No. 09/226,775 filed Jan. 6, 1999.

[0137] In brief, the strategy employed utilizes the motifs or supermotifs which correlate with binding to certain HLA molecules. The motifs or supermotifs are defined by having primary anchors, and in many cases secondary anchors. Analog peptides can be created by substituting amino acid residues at primary anchor, secondary anchor, or at primary and secondary anchor positions. Generally, analogs are made for peptides that already bear a motif or supermotif. Preferred secondary anchor residues of supermotifs and motifs that have been defined for HLA class I and class II binding peptides are shown in Tables II and III, respectively.

[0138] For a number of the motifs or supermotifs in accordance with the invention, residues are defined which are deleterious to binding to allele-specific HLA molecules or members of HLA supertypes that bind the respective motif or supermotif (Tables II and Ill). Accordingly, removal of such residues that are detrimental to binding can be performed in accordance with the present invention. For example, in the case of the A3 supertype, when all peptides that have such deleterious residues are removed from the population of peptides used in the analysis, the incidence of cross-reactivity increased from 22% to 37% (see, e.g., Sidney, J. et al., Hu. Immunol. 45:79, 1996). Thus, one strategy to improve the cross-reactivity of peptides within a given supermotif is simply to delete one or more of the deleterious residues present within a peptide and substitute a small “neutral” residue such as Ala (that may not influence T cell recognition of the peptide). An enhanced likelihood of cross-reactivity is expected if, together with elimination of detrimental residues within a peptide, “preferred” residues associated with high affinity binding to an allele-specific HLA molecule or to multiple HLA molecules within a superfamily are inserted.

[0139] To ensure that an analog peptide, when used as a vaccine, actually elicits a CTL response to the native epitope in vivo (or, in the case of class II epitopes, elicits helper T cells that cross-react with the wild type peptides), the analog peptide may be used to immunize T cells in vitro from individuals of the appropriate HLA allele. Thereafter, the immunized cells' capacity to induce lysis of wild type peptide sensitized target cells is evaluated. It will be desirable to use as antigen presenting cells, cells that have been either infected, or transfected with the appropriate genes, or, in the case of class II epitopes only, cells that have been pulsed with whole protein antigens, to establish whether endogenously produced antigen is also recognized by the relevant T cells.

[0140] Another embodiment of the invention is to create analogs of weak binding peptides, to thereby ensure adequate numbers of cross-reactive cellular binders. Class I binding peptides exhibiting binding affinities of 500-5000 nM, and carrying an acceptable but suboptimal primary anchor residue at one or both positions can be “fixed” by substituting preferred anchor residues in accordance with the respective supertype. The analog peptides can then be tested for crossbinding activity.

[0141] Another embodiment for generating effective peptide analogs involves the substitution of residues that have an adverse impact on peptide stability or solubility in, e.g., a liquid environment. This substitution may occur at any position of the peptide epitope. For example, a cysteine can be substituted out in favor of α-amino butyric acid (“B” in the single letter abbreviations for peptide sequences listed herein). Due to its chemical nature, cysteine has the propensity to form disulfide bridges and sufficiently alter the peptide structurally so as to reduce binding capacity. Substituting α-amino butyric acid for cysteine not only alleviates this problem, but actually improves binding and crossbinding capability in certain instances (see, e.g., the review by Sette et al., In: Persistent Viral Infections, Eds. R. Ahmed and I. Chen, John Wiley & Sons, England, 1999).

[0142] Representative analog peptides are set forth in Tables XXII-XXVII. The Table indicates the length and sequence of the analog peptide as well as the motif or supermotif, if appropriate. The “source” column indicates the residues substituted at the indicated position numbers for the respective analog.

[0143] IV.G. COMPUTER SCREENING OF PROTEIN SEQUENCES FROM DISEASE-RELATED ANTIGENS FOR SUPERMOTIF- OR MOTIF-BEARING PEPTIDES

[0144] In order to identify supermotif- or motif-bearing epitopes in a target antigen, a native protein sequence, e.g., a tumor-associated antigen, or sequences from an infectious organism, or a donor tissue for transplantation, is screened using a means for computing, such as an intellectual calculation or a computer, to determine the presence of a supermotif or motif within the sequence. The information obtained from the analysis of native peptide can be used directly to evaluate the status of the native peptide or may be utilized subsequently to generate the peptide epitope.

[0145] Computer programs that allow the rapid screening of protein sequences for the occurrence of the subject supermotifs or motifs are encompassed by the present invention; as are programs that permit the generation of analog peptides. These programs are implemented to analyze any identified amino acid sequence or operate on an unknown sequence and simultaneously determine the sequence and identify motif-bearing epitopes thereof, analogs can be simultaneously determined as well. Generally, the identified sequences will be from a pathogenic organism or a tumor-associated peptide. For example, the target TAA molecules include, without limitation, CEA, MAGE, p53 and HER2/neu.

[0146] It is important that the selection criteria utilized for prediction of peptide binding are as accurate as possible, to correlate most efficiently with actual binding. Prediction of peptides that bind, for example, to HLA-A*0201, on the basis of the presence of the appropriate primary anchors, is positive at about a 30% rate (see, e.g., Ruppert, J. et al. Cell 74:929, 1993). However, by extensively analyzing peptide-HLA binding data disclosed herein, data in related patent applications, and data in the art, the present inventors have developed a number of allele-specific polynomial algorithms that dramatically increase the predictive value over identification on the basis of the presence of primary anchor residues alone. These algorithms take into account not only the presence or absence of primary anchors, but also consider the positive or deleterious presence of secondary anchor residues (to account for the impact of different amino acids at different positions). The algorithms are essentially based on the premise that the overall affinity (or ΔG) of peptide-HLA interactions can be approximated as a linear polynomial function of the type:

ΔG=a₁ᵢ×a₂ᵢ×a₃ᵢ . . . ×aₙᵢ

[0147] where aⱼᵢ is a coefficient that represents the effect of the presence of a given amino acid (j) at a given position (i) along the sequence of a peptide of n amino acids. An important assumption of this method is that the effects at each position are essentially independent of each other. This assumption is justified by studies that demonstrated that peptides are bound to HLA molecules and recognized by T cells in essentially an extended conformation. Derivation of specific algorithm coefficients has been described, for example, in Gulukota, K. et al., J. Mol. Biol. 267:1258, 1997.

[0148] Additional methods to identify preferred peptide sequences, which also make use of specific motifs, include the use of neural networks and molecular modeling programs (see, e.g., Milik et al., Nature Biotechnology 16:753, 1998; Altuvia et al., Hum. Immunol. 58:1, 1997; Altuvia et al., J. Mol. Biol. 249:244, 1995; Buus, S. Curr. Opin. Immunol. 11:209-213, 1999; Brusic, V. et al., Bioinformatics 14:121-130, 1998; Parker et al., J. Immunol. 152:163, 1993; Meister et al., Vaccine 13:581, 1995; Hammner et al., J. Exp. Med. 180:2353, 1994; Sturniolo et al., Nature Biotechnol. 17:555 1999).

[0149] For example, it has been shown that in sets of A*0201 motif-bearing peptides containing at least one preferred secondary anchor residue while avoiding the presence of any deleterious secondary anchor residues, 69% of the peptides will bind A*0201 with an IC₅₀ less than 500 nM (Ruppert, J. et al. Cell 74:929, 1993). These algorithms are also flexible in that cut-off scores may be adjusted to select sets of peptides with greater or lower predicted binding properties, as desired.

[0150] In utilizing computer screening to identify peptide epitopes, a protein sequence or translated sequence may be analyzed using software developed to search for motifs, for example the “FINDPATTERNS’ program (Devereux, et al. Nucl. Acids Res. 12:387-395, 1984) or MotifSearch 1.4 software program (D. Brown, San Diego, Calif.) to identify potential peptide sequences containing appropriate HLA binding motifs. The identified peptides can be scored using customized polynomial algorithms to predict their capacity to bind specific HLA class I or class II alleles. As appreciated by one of ordinary skill in the art, a large array of computer programming software and hardware options are available in the relevant art which can be employed to implement the motifs of the invention in order to evaluate (e.g., without limitation, to identify epitopes, identify epitope concentration per peptide length, or to generate analogs) known or unknown peptide sequences.

[0151] In accordance with the procedures described above, MAGE2/3 peptide epitopes and analogs thereof that are able to bind HLA supertype groups or allele-specific HLA molecules have been identified (Tables VII-XX; Table XXII-XXXI).

[0152] IV.H. PREPERATION OF PEPTIDE EPITOPES

[0153] Peptides in accordance with the invention can be prepared synthetically, by recombinant DNA technology or chemical synthesis, or from natural sources such as native tumors or pathogenic organisms.

[0154] Peptide epitopes may be synthesized individually or as polyepitopic peptides. Although the peptide will preferably be substantially free of other naturally occurring host cell proteins and fragments thereof, in some embodiments the peptides may be synthetically conjugated to native fragments or particles.

[0155] The peptides in accordance with the invention can be a variety of lengths, and either in their neutral (uncharged) forms or in forms which are salts. The peptides in accordance with the invention are either free of modifications such as glycosylation, side chain oxidation, or phosphorylation; or they contain these modifications, subject to the condition that modifications do not destroy the biological activity of the peptides as described herein.

[0156] When possible, it may be desirable to optimize HLA class I binding epitopes of the invention, such as can be used in a polyepitopic construct, to a length of about 8 to about 13 amino acid residues, often 8 to 11, preferably 9 to 10. HLA class II binding peptide epitopes of the invention may be optimized to a length of about 6 to about 30 amino acids in length, preferably to between about 13 and about 20 residues. Preferably, the peptide epitopes are commensurate in size with endogenously processed pathogen-derived peptides or tumor cell peptides that are bound to the relevant HLA molecules, however, the identification and preparation of peptides that comprise epitopes of the invention can also be carried out using the techniques described herein.

[0157] In alternative embodiments, epitopes of the invention can be linked as a polyepitopic peptide, or as a minigene that encodes a polyepitopic peptide.

[0158] In another embodiment, it is preferred to identify native peptide regions that contain a high concentration of class I and/or class II epitopes. Such a sequence is generally selected on the basis that it contains the greatest number of epitopes per amino acid length. It is to be appreciated that epitopes can be present in a nested or overlapping manner, e.g. a 10 amino acid long peptide could contain two 9 amino acid long epitopes and one 10 amino acid long epitope; upon intracellular processing, each epitope can be exposed and bound by an HLA molecule upon administration of such a peptide. This larger, preferably multi-epitopic, peptide can be generated synthetically, recombinantly, or via cleavage from the native source.

[0159] The peptides of the invention can be prepared in a wide variety of ways. For the preferred relatively short size, the peptides can be synthesized in solution or on a solid support in accordance with conventional techniques. Various automatic synthesizers are commercially available and can be used in accordance with known protocols. (See, for example, Stewart & Young, SOLID PHASE PEPTIDE SYNTHESIS, 2D. ED., Pierce Chemical Co., 1984). Further, individual peptide epitopes can be joined using chemical ligation to produce larger peptides that are still within the bounds of the invention.

[0160] Alternatively, recombinant DNA technology can be employed wherein a nucleotide sequence which encodes an immunogenic peptide of interest is inserted into an expression vector, transformed or transfected into an appropriate host cell and cultivated under conditions suitable for expression. These procedures are generally known in the art, as described generally in Sambrook et al., MOLECULAR CLONING, A LABORATORY MANUAL, Cold Spring Harbor Press, Cold Spring Harbor, N.Y. (1989). Thus, recombinant polypeptides which comprise one or more peptide sequences of the invention can be used to present the appropriate T cell epitope.

[0161] The nucleotide coding sequence for peptide epitopes of the preferred lengths contemplated herein can be synthesized by chemical techniques, for example, the phosphotriester method of Matteucci, et al., J. Am. Chem. Soc. 103:3185 (1981). Peptide analogs can be made simply by substituting the appropriate and desired nucleic acid base(s) for those that encode the native peptide sequence; exemplary nucleic acid substitutions are those that encode an amino acid defined by the motifs/supermotifs herein. The coding sequence can then be provided with appropriate linkers and ligated into expression vectors commonly available in the art, and the vectors used to transform suitable hosts to produce the desired fusion protein. A number of such vectors and suitable host systems are now available. For expression of the fusion proteins, the coding sequence will be provided with operably linked start and stop codons, promoter and terminator regions and usually a replication system to provide an expression vector for expression in the desired cellular host. For example, promoter sequences compatible with bacterial hosts are provided in plasmids containing convenient restriction sites for insertion of the desired coding sequence. The resulting expression vectors are transformed into suitable bacterial hosts. Of course, yeast, insect or mammalian cell hosts may also be used, employing suitable vectors and control sequences.

[0162] IV.I. ASSAYS TO DETECT T-CELL RESPONSES

[0163] Once HLA binding peptides are identified, they can be tested for the ability to elicit a T-cell response. The preparation and evaluation of motif-bearing peptides are described in PCT publications WO 94/20127 and WO 94/03205. Briefly, peptides comprising epitopes from a particular antigen are synthesized and tested for their ability to bind to the appropriate HLA proteins. These assays may involve evaluating the binding of a peptide of the invention to purified HLA class I molecules in relation to the binding of a radioiodinated reference peptide. Alternatively, cells expressing empty class I molecules (i.e. lacking peptide therein) may be evaluated for peptide binding by immunofluorescent staining and flow microfluorimetry. Other assays that may be used to evaluate peptide binding include peptide-dependent class I assembly assays and/or the inhibition of CTL recognition by peptide competition. Those peptides that bind to the class I molecule, typically with an affinity of 500 nM or less, are further evaluated for their ability to serve as targets for CTLs derived from infected or immunized individuals, as well as for their capacity to induce primary in vitro or in vivo CTL responses that can give rise to CTL populations capable of reacting with selected target cells associated with a disease.

[0164] Analogous assays are used for evaluation of HLA class II binding peptides. HLA class II motif-bearing peptides that are shown to bind, typically at an affinity of 1000 nM or less, are further evaluated for the ability to stimulate HTL responses.

[0165] Conventional assays utilized to detect T cell responses include proliferation assays, lymphokine secretion assays, direct cytotoxicity assays, and limiting dilution assays. For example, antigen-presenting cells that have been incubated with a peptide can be assayed for the ability to induce CTL responses in responder cell populations. Antigen-presenting cells can be normal cells such as peripheral blood mononuclear cells or dendritic cells. Alternatively, mutant non-human mammalian cell lines that are deficient in their ability to load class I molecules with internally processed peptides and that have been transfected with the appropriate human class I gene, may be used to test for the capacity of the peptide to induce in vitro primary CTL responses.

[0166] Peripheral blood mononuclear cells (PBMCs) may be used as the responder cell source of CTL precursors. The appropriate antigen-presenting cells are incubated with peptide, after which the peptide-loaded antigen-presenting cells are then incubated with the responder cell population under optimized culture conditions. Positive CTL activation can be determined by assaying the culture for the presence of CTLs that kill radio-labeled target cells, both specific peptide-pulsed targets as well as target cells expressing endogenously processed forms of the antigen from which the peptide sequence was derived.

[0167] Additionally, a method has been devised which allows direct quantification of antigen-specific T cells by staining with Fluorescein-labelled HLA tetrameric complexes (Altman, J. D. et al., Proc. Natl. Acad Sci. USA 90:10330, 1993; Altman, J. D. et al., Science 274:94, 1996). Other relatively recent technical developments include staining for intracellular lymphokines, and interferon-γ release assays or ELISPOT assays. Tetramer staining, intracellular lymphokine staining and ELISPOT assays all appear to be at least 10-fold more sensitive than more conventional assays (Lalvani, A. et al., J. Exp. Med. 186:859, 1997; Dunbar, P. R. et al., Curr. Biol. 8:413, 1998; Murali-Krishna, K. et al., Immunity 8:177, 1998).

[0168] HTL activation may also be assessed using such techniques known to those in the art such as T cell proliferation and secretion of lymphokines, e.g. IL-2 (see, e.g. Alexander et al., Immunity 1:751-761, 1994).

[0169] Alternatively, immunization of HLA transgenic mice can be used to determine immunogenicity of peptide epitopes. Several transgenic mouse models including mice with human A2.1, A11 (which can additionally be used to analyze HLA-A3 epitopes), and B7 alleles have been characterized and others (e.g., transgenic mice for HLA-A1 and A24) are being developed. HLA-DR1 and HLA-DR3 mouse models have also been developed. Additional transgenic mouse models with other HLA alleles may be generated as necessary. Mice may be immunized with peptides emulsified in Incomplete Freund's Adjuvant and the resulting T cells tested for their capacity to recognize peptide-pulsed target cells and target cells transfected with appropriate genes. CTL responses may be analyzed using cytotoxicity assays described above. Similarly, HTL responses may be analyzed using such assays as T cell proliferation or secretion of lymphokines.

[0170] IV.J. USE OF PEPTIDE EPITOPES AS DIAGNOSTIC AGENTS AND FOR EVALUATING IMMUNE RESPONSES

[0171] In one embodiment of the invention, HLA class I and class II binding peptides as described herein are used as reagents to evaluate an immune response. The immune response to be evaluated is induced by using as an immunogen any agent that may result in the production of antigen-specific CTLs or HTLs that recognize and bind to the peptide epitope(s) to be employed as the reagent. The peptide reagent need not be used as the immunogen. Assay systems that are used for such an analysis include relatively recent technical developments such as tetramers, staining for intracellular lymphokines and interferon release assays, or ELISPOT assays.

[0172] For example, a peptide of the invention may be used in a tetramer staining assay to assess peripheral blood mononuclear cells for the presence of antigen-specific CTLs following exposure to a tumor cell antigen or an immunogen. The HLA-tetrameric complex is used to directly visualize antigen-specific CTLs (see, e.g., Ogg et al., Science 279:2103-2106, 1998; and Altman et al., Science 174:94-96, 1996) and determine the frequency of the antigen-specific CTL population in a sample of peripheral blood mononuclear cells. A tetramer reagent using a peptide of the invention may be generated as follows: A peptide that binds to an HLA molecule is refolded in the presence of the corresponding HLA heavy chain and β₂-microglobulin to generate a trirolecular complex. The complex is biotinylated at the carboxyl terminal end of the heavy chain at a site that was previously engineered into the protein. Tetramer formation is then induced by the addition of streptavidin. By means of fluorescently labeled streptavidin, the tetramer can be used to stain antigen-specific cells. The cells may then be identified, for example, by flow cytometry. Such an analysis may be used for diagnostic or prognostic purposes.

[0173] Peptides of the invention can also be used as reagents to evaluate immune recall responses (see, e.g., Bertoni et al., J. Clin. Invest. 100:503-513, 1997 and Penna et al., J. Exp. Med. 174:1565-1570, 1991). For example, patient PBMC samples from individuals with cancer may be analyzed for the presence of antigen-specific CTLs or HTLs using specific peptides. A blood sample containing mononuclear cells may be evaluated by cultivating the PBMCs and stimulating the cells with a peptide of the invention. After an appropriate cultivation period, the expanded cell population may be analyzed, for example, for CTL or for HTL activity.

[0174] The peptides can also be used as reagents to evaluate the efficacy of a vaccine. PBMCs obtained from a patient vaccinated with an immunogen may be analyzed using, for example, either of the methods described above. The patient is HLA typed, and peptide epitope reagents that recognize the allele-specific molecules present in that patient are selected for the analysis. The immunogenicity of the vaccine is indicated by the presence of epitope-specific CTLs and/or HTLs in the PBMC sample.

[0175] The peptides of the invention may also be used to make antibodies, using techniques well known in the art (see, e.g. CURRENT PROTOCOLS IN IMMUNOLOGY, Wiley/Greene, NY; and Antibodies A Laboratory Manual, Harlow and Lane, Cold Spring Harbor Laboratory Press, 1989), which may be useful as reagents to diagnose or monitor cancer. Such antibodies include those that recognize a peptide in the context of an HLA molecule, ie., antibodies that bind to a peptide-MHC complex.

[0176] IV.K. VACCINE COMPOSITIONS

[0177] Vaccines and methods of preparing vaccines that contain an immunogenically effective amount of one or more peptides as described herein are further embodiments of the invention. Once appropriately immunogenic epitopes have been defined, they can be sorted and delivered by various means, herein referred to as “vaccine” compositions. Such vaccine compositions can include, for example, lipopeptides (e.g., Vitiello, A. et al., J. Clin. Invest. 95:341, 1995), peptide compositions encapsulated in poly(DL-lactide-co-glycolide) (“PLG”) microspheres (see, e.g., Eldridge, et al., Molec. Immunol. 28:287-294, 1991: Alonso et al., Vaccine 12:299-306, 1994; Jones et al., Vaccine 13:675-681, 1995), peptide compositions contained in immune stimulating complexes (ISCOMS) (see, e.g., Takahashi et al., Nature 344:873-875, 1990; Hu et al., Clin Exp Immunol. 113:235-243, 1998), multiple antigen peptide systems (MAPs) (see e.g., Tam, J. P., Proc. Natl. Acad. Sci. U.S.A. 85:5409-5413, 1988; Tam, J. P., J. Immunol. Methods 196:17-32, 1996), peptides formulated as multivalent peptides; peptides for use in ballistic delivery systems, typically crystallized peptides, viral delivery vectors (Perkus, M. E. et al., In: Concepts in vaccine development, Kaufmann, S. H. E., ed., p. 379, 1996; Chakrabarti, S. et al., Nature 320:535, 1986; Hu, S. L. et al., Nature 320:537, 1986; Kieny, M. -P. et al., AIDS Bio/Technology 4:790, 1986; Top, F. H. et al., J. Infect. Dis. 124:148, 1971; Chanda, P. K. et al., Virology 175:535, 1990), particles of viral or synthetic origin (e.g., Kofler, N. et al., J. Immunol. Methods. 192:25, 1996; Eldridge, J. H. et al., Sem. Hematol. 30:16, 1993; Falo, L. D., Jr. et al., Nature Med. 7:649, 1995), adjuvants (Warren, H. S., Vogel, F. R., and Chedid, L. A. Annu. Rev. Immunol. 4:369, 1986; Gupta, R. K. et al., Vaccine 11:293, 1993), liposomes (Reddy, R. et al., J. Immunol. 148:1585, 1992; Rock, K. L., Immunol. Today 17:131, 1996), or, naked or particle absorbed cDNA (Ulmer, J. B. et al., Science 259:1745, 1993; Robinson, H. L., Hunt, L. A., and Webster, R. G., Vaccine 11:957, 1993; Shiver, J. W. et al., In: Concepts in vaccine development, Kaufrann, S. H. E., ed., p. 423, 1996; Cease, K. B., and Berzofsky, J. A., Annu. Rev. Immunol. 12:923, 1994 and Eldridge, J. H. et al., Sem. Hematol. 30:16, 1993). Toxin-targeted delivery technologies, also known as receptor mediated targeting, such as those of Avant Immunotherapeutics, Inc. (Needham, Mass.) may also be used.

[0178] Vaccines of the invention include nucleic acid-mediated modalities. DNA or RNA encoding one or more of the peptides of the invention can also be administered to a patient. This approach is described, for instance, in Wolff et. al., Science 247:1465 (1990) as well as U.S. Pat. Nos. 5,580,859; 5,589,466; 5,804,566; 5,739,118; 5,736,524; 5,679,647; WO 98/04720; and in more detail below. Examples of DNA-based delivery technologies include “naked DNA”, facilitated (bupivicaine, polymers, peptide-mediated) delivery, cationic lipid complexes, and particle-mediated (“gene gun”) or pressure-mediated delivery (see, e.g., U.S. Pat. No. 5,922,687).

[0179] For therapeutic or prophylactic immunization purposes, the peptides of the invention can also be expressed by viral or bacterial vectors. Examples of expression vectors include attenuated viral hosts, such as vaccinia or fowlpox. As an example of this approach, vaccinia virus is used as a vector to express nucleotide sequences that encode the peptides of the invention. Upon introduction into a host bearing a tumor, the recombinant vaccinia virus expresses the immunogenic peptide, and thereby elicits a host CTL and/or HTL response. Vaccinia vectors and methods useful in immunization protocols are described in, e.g., U.S. Pat. No.4,722,848. Another vector is BCG (Bacille Calmette Guerin). BCG vectors are described in Stover et al., Nature 351-:456-460 (1991). A wide variety of other vectors useful for therapeutic administration or immunization of the peptides of the invention, e.g. adeno and adeno-associated virus vectors, retroviral vectors, Salmonella typhi vectors, detoxified anthrax toxin vectors, and the like, will be apparent to those skilled in the art from the description herein.

[0180] Furthermore, vaccines in accordance with the invention encompass compositions of one or more of the claimed peptide(s). The peptide(s) can be individually linked to its own carrier; alternatively, the peptide(s) can exist as a homopolymer or heteropolymer of active peptide units. Such a polymer has the advantage of increased immunological reaction and, where different peptide epitopes are used to make up the polymer, the additional ability to induce antibodies and/or CTLs that react with different antigenic determinants of the pathogenic organism or tumor-related peptide targeted for an immune response. The composition may be a naturally occurring region of an antigen or may be prepared, e.g., recombinantly or by chemical synthesis.

[0181] Carriers that can be used with vaccines of the invention are well known in the art, and include, e.g., thyroglobulin, albumins such as human serum albumin, tetanus toxoid, polyamino acids such as poly L-lysine, poly L-glutamic acid, influenza, hepatitis B virus core protein, and the like. The vaccines can contain a physiologically tolerable (i.e., acceptable) diluent such as water, or saline, preferably phosphate buffered saline. The vaccines also typically include an adjuvant. Adjuvants such as incomplete Freund's adjuvant, aluminum phosphate, aluminum hydroxide, or alum are examples of materials well known in the art. Additionally, as disclosed herein, CTL responses can be primed by conjugating peptides of the invention to lipids, such as tripalmitoyl-S-glycerylcysteinlyseryl-serine (P₃CSS).

[0182] Upon immunization with a peptide composition in accordance with the invention, via injection, aerosol, oral, transdermal, transmucosal, intrapleural, intrathecal, or other suitable routes, the immune system of the host responds to the vaccine by producing large amounts of CTLs and/or HTLs specific for the desired antigen. Consequently, the host becomes at least partially immune to later infection, or at least partially resistant to developing an ongoing chronic infection, or derives at least some therapeutic benefit when the antigen was tumor-associated.

[0183] In some embodiments, it may be desirable to combine the class I peptide components with components that induce or facilitate neutralizing antibody and or helper T cell responses to the target antigen of interest. A preferred embodiment of such a composition comprises class I and class II epitopes in accordance with the invention. An alternative embodiment of such a composition comprises a class I and/or class II epitope in accordance with the invention, along with a cross-binding HLA class II epitope such as PADRE™ (Epimmune, San Diego, Calif.) molecule (described, for example, in U.S. Pat. No. 5,736,142).

[0184] A vaccine of the invention can also include antigen-presenting cells (APC), such as dendritic cells (DC), as a vehicle to present peptides of the invention. Vaccine compositions can be created in vitro, following dendritic cell mobilization and harvesting, whereby loading of dendritic cells occurs in vitro. For example, dendritic cells are transfected, e.g., with a minigene in accordance with the invention, or are pulsed with peptides. The dendritic cell can then be administered to a patient to elicit immune responses in vivo.

[0185] Vaccine compositions, either DNA- or peptide-based, can also be administered in vivo in combination with dendritic cell mobilization whereby loading of dendritic cells occurs in vivo.

[0186] Antigenic peptides are used to elicit a CTL and/or HTL response ex vivo, as well. The resulting CTL or HTL cells, can be used to treat tumors in patients that do not respond to other conventional forms of therapy, or will not respond to a therapeutic vaccine peptide or nucleic acid in accordance with the invention. Ex vivo CTL or HTL responses to a particular tumor-associated antigen are induced by incubating in tissue culture the patient's, or genetically compatible, CTL or HTL precursor cells together with a source of antigen-presenting cells, such as dendritic cells, and the appropriate immunogenic peptide. After an appropriate incubation time (typically about 7-28 days), in which the precursor cells are activated and expanded into effector cells, the cells are infused back into the patient, where they will destroy (CTL) or facilitate destruction (HTL) of their specific target cell (an infected cell or a tumor cell). Transfected dendritic cells may also be used as antigen presenting cells.

[0187] The vaccine compositions of the invention can also be used in combination with other treatments used for cancer, including use in combination with immune adjuvants such as IL-2, IL-12, GM-CSF, and the like.

[0188] Preferably, the following principles are utilized when selecting an array of epitopes for inclusion in a polyepitopic composition for use in a vaccine, or for selecting discrete epitopes to be included in a vaccine and/or to be encoded by nucleic acids such as a minigene. Exemplary epitopes that may be utilized in a vaccine to treat or prevent cancer are set out in Tables XXIII-XXVII and XXXI. It is preferred that each of the following principles are balanced in order to make the selection. The multiple epitopes to be incorporated in a given vaccine composition may be, but need not be, contiguous in sequence in the native antigen from which the epitopes are derived.

[0189] 1.) Epitopes are selected which, upon administration, mimic immune responses that have been observed to be correlated with tumor clearance. For HLA Class I this includes 3-4 epitopes that come from at least one TAA. For HLA Class II a similar rationale is employed; again 3-4 epitopes are selected from at least one TAA (see e.g., Rosenberg et al., Science 278:1447-1450). Epitopes from one TAA may be used in combination with epitopes from one or more additional TAAs to produce a vaccine that targets tumors with varying expression patterns of frequently-expressed TAAs as described, e.g., in Example 15. The MAGE2/3 epitopes selected for inclusion are preferably conserved between the two proteins.

[0190] 2.) Epitopes are selected that have the requisite binding affinity established to be correlated with immunogenicity: for HLA Class I an IC₅₀ of 500 nM or less, or for Class II an IC₅₀ of 1000 nM or less.

[0191] 3.) Sufficient supermotif bearing-peptides, or a sufficient array of allele-specific motif-bearing peptides, are selected to give broad population coverage. For example, it is preferable to have at least 80% population coverage. A Monte Carlo analysis, a statistical evaluation known in the art, can be employed to assess the breadth, or redundancy of, population coverage.

[0192] 4.) When selecting epitopes from cancer-related antigens it is often useful to select analogs because the patient may have developed tolerance to the native epitope. When selecting epitopes for infectious disease-related antigens it is preferable to select either native or analoged epitopes.

[0193] 5.) Of particular relevance are epitopes referred to as “nested epitopes.” Nested epitopes occur where at least two epitopes overlap in a given peptide sequence. A nested peptide sequence can comprise both HLA class I and HLA class II epitopes. When providing nested epitopes, a general objective is to provide the greatest number of epitopes per sequence. Thus, an aspect is to avoid providing a peptide that is any longer than the amino terminus of the amino terminal epitope and the carboxyl terminus of the carboxyl terminal epitope in the peptide. When providing a multi-epitopic sequence, such as a sequence comprising nested epitopes, it is generally important to screen the sequence in order to insure that it does not have pathological or other deleterious biological properties.

[0194] 6.) If a polyepitopic protein is created, or when creating a minigene, an objective is to generate the smallest peptide that encompasses the epitopes of interest. This principle is similar, if not the same as that employed when selecting a peptide comprising nested epitopes. However, with an artificial polyepitopic peptide, the size minimization objective is balanced against the need to integrate any spacer sequences between epitopes in the polyepitopic protein. Spacer amino acid residues can, for example, be introduced to avoid junctional epitopes (an epitope recognized by the immune system, not present in the target antigen, and only created by the man-made juxtaposition of epitopes), or to facilitate cleavage between epitopes and thereby enhance epitope presentation. Junctional epitopes are generally to be avoided because the recipient may generate an immune response to that non-native epitope. Of particular concern is a junctional epitope that is a “dominant epitope.” A dominant epitope may lead to such a zealous response that immune responses to other epitopes are diminished or suppressed.

[0195] IV.K1. MINIGENE VACCINES

[0196] A number of different approaches are available which allow simultaneous delivery of multiple epitopes. Nucleic acids encoding the peptides of the invention are a particularly useful embodiment of the invention. Epitopes for inclusion in a minigene are preferably selected according to the guidelines set forth in the previous section. A preferred means of administering nucleic acids encoding the peptides of the invention uses minigene constructs encoding a peptide comprising one or multiple epitopes of the invention.

[0197] The use of multi-epitope minigenes is described below and in, e.g., co-pending application U.S. Ser. No. 09/311,784; Ishioka et al, J. Immunol. 162:3915-3925, 1999; An, L. and Whitton, J. L., J. Virol. 71:2292, 1997; Thomson, S. A. et al, J. Immunol. 157:822, 1996; Whitton, J. L. et al., J. Virol. 67:348, 1993; Hanke, R. et al., Vaccine 16:426, 1998. For example, a multi-epitope DNA plasmid encoding supermotif- and/or motif-bearing MAGE2/3 epitopes derived from multiple regions of the MAGE2/3 proteins, the PADRE™ universal helper T cell epitope (or multiple HTL epitopes from MAGE2/3), and an endoplasmic reticulum-translocating signal sequence can be engineered. A vaccine may also comprise epitopes, in addition to MAGE2/3 epitopes, that are derived from other TAAs.

[0198] The immunogenicity of a multi-epitopic minigene can be tested in transgenic mice to evaluate the magnitude of CTL induction responses against the epitopes tested. Further, the immunogenicity of DNA-encoded epitopes in vivo can be correlated with the in vitro responses of specific CTL lines against target cells transfected with the DNA plasmid. Thus, these experiments can show that the minigene serves to both: 1.) generate a CTL response and 2.) that the induced CTLs recognized cells expressing the encoded epitopes.

[0199] For example, to create a DNA sequence encoding the selected epitopes (minigene) for expression in human cells, the amino acid sequences of the epitopes may be reverse translated. A human codon usage table can be used to guide the codon choice for each amino acid. These epitope-encoding DNA sequences may be directly adjoined, so that when translated, a continuous polypeptide sequence is created. To optimize expression and/or immunogenicity, additional elements can be incorporated into the minigene design. Examples of amino acid sequences that can be reverse translated and included in the minigene sequence include: HLA class I epitopes, HLA class II epitopes, a ubiquitination signal sequence, and/or an endoplasmic reticulum targeting signal. In addition, HLA presentation of CTL and HTL epitopes may be improved by including synthetic (e.g. poly-alanine) or naturally-occurring flanking sequences adjacent to the CTL or HTL epitopes; these larger peptides comprising the epitope(s) are within the scope of the invention.

[0200] The minigene sequence may be converted to DNA by assembling oligonucleotides that encode the plus and minus strands of the minigene. Overlapping oligonucleotides (30-100 bases long) may be synthesized, phosphorylated, purified and annealed under appropriate conditions using well known techniques. The ends of the oligonucleotides can be joined, for example, using T4 DNA ligase. This synthetic minigene, encoding the epitope polypeptide, can then be cloned into a desired expression vector.

[0201] Standard regulatory sequences well known to those of skill in the art are preferably included in the vector to ensure expression in the target cells. Several vector elements are desirable: a promoter with a down-stream cloning site for minigene insertion; a polyadenylation signal for efficient transcription termination; an E. coli origin of replication; and an E. coli selectable marker (e.g. ampicillin or kanamycin resistance). Numerous promoters can be used for this purpose, e.g., the human cytomegalovirus (hCMV) promoter. See, e.g., U.S. Pat. Nos. 5,580,859 and 5,589,466 for other suitable promoter sequences.

[0202] Additional vector modifications may be desired to optimize minigene expression and immunogenicity. In some cases, introns are required for efficient gene expression, and one or more synthetic or naturally-occurring introns could be incorporated into the transcribed region of the minigene. The inclusion of mRNA stabilization sequences and sequences for replication in mammalian cells may also be considered for increasing minigene expression.

[0203] Once an expression vector is selected, the minigene is cloned into the polylinker region downstream of the promoter. This plasmid is transformed into an appropriate E. coli strain, and DNA is prepared using standard techniques. The orientation and DNA sequence of the minigene, as well as all other elements included in the vector, are confirmed using restriction mapping and DNA sequence analysis. Bacterial cells harboring the correct plasmid can be stored as a master cell bank and a working cell bank.

[0204] In addition, immunostimulatory sequences (ISSs or CpGs) appear to play a role in the immunogenicity of DNA vaccines. These sequences may be included in the vector, outside the minigene coding sequence, if desired to enhance immunogenicity.

[0205] In some embodiments, a bi-cistronic expression vector which allows production of both the minigene-encoded epitopes and a second protein (included to enhance or decrease immunogenicity) can be used. Examples of proteins or polypeptides that could beneficially enhance the immune response if co-expressed include cytokines (e.g., IL-2, IL-12, GM-CSF), cytokine-inducing molecules (e.g., LeIF), costimulatory molecules, or for HTL responses, pan-DR binding proteins (e.g., PADRE™, Epimmune, San Diego, Calif.). Helper (HTL) epitopes can be joined to intracellular targeting signals and expressed separately from expressed CTL epitopes; this allows direction of the HTL epitopes to a cell compartment different than that of the CTL epitopes. If required, this could facilitate more efficient entry of HTL epitopes into the HLA class II pathway, thereby improving HTL induction. In contrast to HTL or CTL induction, specifically decreasing the immune response by co-expression of immunosuppressive molecules (e.g. TGF-β) may be beneficial in certain diseases.

[0206] Therapeutic quantities of plasmid DNA can be produced for example, by fermentation in E. coli, followed by purification. Aliquots from the working cell bank are used to inoculate growth medium, and grown to saturation in shaker flasks or a bioreactor according to well known techniques. Plasmid DNA can be purified using standard bioseparation technologies such as solid phase anion-exchange resins supplied by QIAGEN, Inc. (Valencia, Calif.). If required, supercoiled DNA can be isolated from the open circular and linear forms using gel electrophoresis or other methods.

[0207] Purified plasmid DNA can be prepared for injection using a variety of formulations. The simplest of these is reconstitution of lyophilized DNA in sterile phosphate-buffered saline (PBS). This approach, known as “naked DNA,” is currently being used for intramuscular (IM) administration in clinical trials. To maximize the immunotherapeutic effects of minigene DNA vaccines, an alternative method for formulating purified plasmid DNA may be desirable. A variety of methods have been described, and new techniques may become available. Cationic lipids, glycolipids, and fusogenic liposomes can also be used in the formulation (see, e.g., as described by WO 93/24640; Mannino & Gould-Fogerite, BioTechniques 6(7): 682 (1988); U.S. Pat No. 5,279,833; WO 91/06309; and Felgner, et al., Proc. Nat'l Acad. Sci. USA 84:7413 (1987). In addition, peptides and compounds referred to collectively as protective, interactive, non-condensing compounds (PINC) could also be complexed to purified plasmid DNA to influence variables such as stability, intramuscular dispersion, or trafficking to specific organs or cell types.

[0208] Target cell sensitization can be used as a functional assay for expression and HLA class I presentation of minigene-encoded CTL epitopes. For example, the plasmid DNA is introduced into a mammalian cell line that is suitable as a target for standard CTL chromium release assays. The transfection method used will be dependent on the final formulation. Electroporation can be used for “naked” DNA, whereas cationic lipids allow direct in vitro transfection. A plasmid expressing green fluorescent protein (GFP) can be co-transfected to allow enrichment of transfected cells using fluorescence activated cell sorting (FACS). These cells are then chromium-51 (⁵¹Cr) labeled and used as target cells for epitope-specific CTL lines; cytolysis, detected by ⁵¹Cr release, indicates both production of, and HLA presentation of, minigene-encoded CTL epitopes. Expression of HTL epitopes may be evaluated in an analogous manner using assays to assess HTL activity.

[0209] In vivo immunogenicity is a second approach for functional testing of minigene DNA formulations. Transgenic mice expressing appropriate human HLA proteins are immunized with the DNA product. The dose and route of administration are formulation dependent (e.g., IM for DNA in PBS, intraperitoneal (IP) for lipid-complexed DNA). Twenty-one days after immunization, splenocytes are harvested and restimulated for one week in the presence of peptides encoding each epitope being tested. Thereafter, for CTL effector cells, assays are conducted for cytolysis of peptide-loaded, ⁵¹Cr-labeled target cells using standard techniques. Lysis of target cells that were sensitized by HLA loaded with peptide epitopes, corresponding to minigene-encoded epitopes, demonstrates DNA vaccine function for in vivo induction of CTLs. Immunogenicity of HTL epitopes is evaluated in transgenic mice in an analogous manner.

[0210] Alternatively, the nucleic acids can be administered using ballistic delivery as described, for instance, in U.S. Pat. No. 5,204,253. Using this technique, particles comprised solely of DNA are administered. In a further alternative embodiment, DNA can be adhered to particles, such as gold particles.

[0211] Minigenes can also be delivered using other bacterial or viral delivery systems well known in the art, e.g., an expression construct encoding epitopes of the invention can be incorporated into a viral vector such as vaccinia.

[0212] IV.K.2. COMBINATIONS OF CTL PEPTIDES WITH HELPER PEPTIDES

[0213] Vaccine compositions comprising the peptides of the present invention, or analogs thereof, which have immunostimulatory activity may be modified to provide desired attributes, such as improved serum half-life, or to enhance immunogenicity.

[0214] For instance, the ability of a peptide to induce CTL activity can be enhanced by linking the peptide to a sequence which contains at least one epitope that is capable of inducing a T helper cell response. The use of T helper epitopes in conjunction with CTL epitopes to enhance immunogenicity is illustrated, for example, in the co-pending applications U.S. Ser. No. 08/820,360, U.S. Ser. No. 08/197,484, and U.S. Ser. No. 08/464,234.

[0215] Although a CTL peptide can be directly linked to a T helper peptide, often CTL epitope/HTL epitope conjugates are linked by a spacer molecule. The spacer is typically comprised of relatively small, neutral molecules, such as amino acids or amino acid numeric, which are substantially uncharged under physiological conditions. The spacers are typically selected from, e.g., Ala, Gly, or other neutral spacers of nonpolar amino acids or neutral polar amino acids. It will be understood that the optionally present spacer need not be comprised of the same residues and thus may be a hetero- or homo-oligomer. When present, the spacer will usually be at least one or two residues, more usually three to six residues and sometimes 10 or more residues. The CTL peptide epitope can be linked to the T helper peptide epitope either directly or via a spacer either at the amino or carboxy terminus of the CTL peptide. The amino terminus of either the immunogenic peptide or the T helper peptide may be acylated.

[0216] In certain embodiments, the T helper peptide is one that is recognized by T helper cells present in the majority of the population. This can be accomplished by selecting amino acid sequences that bind to many, most, or all of the HLA class II molecules. These are known as “loosely HLA-restricted” or “promiscuous” T helper sequences. Examples of peptides that are promiscuous include sequences from antigens such as tetanus toxoid at positions 830-843 (QYIKANSKFIGITE), Plasmodium falciparum circumsporozoite (CS) protein at positions 378-398 (DIEKKIAKMEKASSVFNVVNS), and Streptococcus 18 kD protein at positions 116 (GAVDSILGGVATYGAA). Other examples include peptides bearing a DR 1-4-7 supermotif, or either of the DR3 motifs.

[0217] Alternatively, it is possible to prepare synthetic peptides capable of stimulating T helper lymphocytes, in a loosely HLA-restricted fashion, using amino acid sequences not found in nature (see, e.g., PCT publication WO 95/07707). These synthetic compounds called Pan-DR-binding epitopes (e.g., PADRE™, Epimmune, Inc., San Diego, Calif.) are designed to most preferably bind most HLA-DR (human HLA class II) molecules. For instance, a pan-DR-binding epitope peptide having the formula: aKXVAAWTLKAAa, where “X” is either cyclohexylalanine, phenylalanine, or tyrosine, and “a” is either D-alanine or L-alanine, has been found to bind to most HLA-DR alleles, and to stimulate the response of T helper lymphocytes from most individuals, regardless of their HLA type. An alternative of a pan-DR binding epitope comprises all “L” natural amino acids and can be provided in the form of nucleic acids that encode the epitope.

[0218] HTL peptide epitopes can also be modified to alter their biological properties. For example, they can be modified to include D-amino acids to increase their resistance to proteases and thus extend their serum half life, or they can be conjugated to other molecules such as lipids, proteins, carbohydrates, and the like to increase their biological activity. For example, a T helper peptide can be conjugated to one or more palmitic acid chains at either the amino or carboxyl termini.

[0219] IV.K3. COMBINATIONS OF CTL PEPTIDES WITH T CELL PRIMING AGENTS

[0220] In some embodiments it may be desirable to include in the pharmaceutical compositions of the invention at least one component which primes cytotoxic T lymphocytes. Lipids have been identified as agents capable of priming CTL in vivo against viral antigens. For example, palmitic acid residues can be attached to the ε-and α-amino groups of a lysine residue and then linked, e.g., via one or more linking residues such as Gly, Gly-Gly-, Ser, Ser-Ser, or the like, to an immunogenic peptide. The lipidated peptide can then be administered either directly in a micelle or particle, incorporated into a liposome, or emulsified in an adjuvant, e.g., incomplete Freund's adjuvant. A preferred immunogenic composition comprises palmitic acid attached to ε- and α-amino groups of Lys, which is attached via linkage, e.g., Ser-Ser, to the amino terminus of the immunogenic peptide.

[0221] As another example of lipid priming of CTL responses, E. coli lipoproteins, such as tripalmitoyl-S-glycerylcysteinlyseryl-serine (P₃CSS) can be used to prime virus specific CTL when covalently attached to an appropriate peptide (see, e.g., Deres, et al., Nature 342:561, 1989). Peptides of the invention can be coupled to P₃CSS, for example, and the lipopeptide administered to an individual to specifically prime a CTL response to the target antigen. Moreover, because the induction of neutralizing antibodies can also be primed with P₃CSS-conjugated epitopes, two such compositions can be combined to more effectively elicit both humoral and cell-mediated responses.

[0222] CTL and/or HTL peptides can also be modified by the addition of amino acids to the termini of a peptide to provide for ease of linking peptides one to another, for coupling to a carrier support or larger peptide, for modifying the physical or chemical properties of the peptide or oligopeptide, or the like. Amino acids such as tyrosine, cysteine, lysine, glutamic or aspartic acid, or the like, can be introduced at the C- or N-terminus of the peptide or oligopeptide, particularly class I peptides. However, it is to be noted that modification at the carboxyl terminus of a CTL epitope may, in some cases, alter binding characteristics of the peptide. In addition, the peptide or oligopeptide sequences can differ from the natural sequence by being modified by terminal-NH₂ acylation, e.g., by alkanoyl (C₁-C₂₀) or thioglycolyl acetylation, terminal-carboxyl amidation, e.g., ammonia, methylamine, etc. In some instances these modifications may provide sites for linking to a support or other molecule.

[0223] IV.K-4. VACCINE COMPOSITIONS COMPRISING DC PULSED WITH CTL AND/OR HTL PEPTIDES

[0224] An embodiment of a vaccine composition in accordance with the invention comprises ex vivo administration of a cocktail of epitope-bearing peptides to PBMC, or isolated DC therefrom, from the patient's blood. A pharmaceutical to facilitate harvesting of DC can be used, such as Progenipoietin™ (Monsanto, St. Louis, Mo.) or GM-CSF/IL4. After pulsing the DC with peptides and prior to reinfusion into patients, the DC are washed to remove unbound peptides. In this embodiment, a vaccine comprises peptide-pulsed DCs which present the pulsed peptide epitopes complexed with HLA molecules on their surfaces.

[0225] The DC can be pulsed ex vivo with a cocktail of peptides, some of which stimulate CTL response to one or more antigens of interest, e.g., a MAGE polypeptide, HER/2neu, p53, CEA, a prostate cancer associated antigen and the like. Optionally, a helper T cell peptide such as a PADRE™ family molecule, can be included to facilitate the CTL response.

[0226] IV.L. ADMINISTRATION OF VACCINES FOR THERAPEUTIC OR PROPHYLACTIC PURPOSES

[0227] The peptides of the present invention and pharmaceutical and vaccine compositions of the invention are useful for administration to mammals, particularly humans, to treat and/or prevent cancer. Vaccine compositions containing the peptides of the invention are administered to a cancer patient or to an individual susceptible to, or otherwise at risk for, cancer to elicit an immune response against TAAs and thus enhance the patient's own immune response capabilities.

[0228] In therapeutic applications, peptide and/or nucleic acid compositions are administered to a patient in an amount sufficient to elicit an effective CTL and/or HTL response to the tumor antigen and to cure or at least partially arrest or slow symptoms and/or complications. An amount adequate to accomplish this is defined as “therapeutically effective dose.” Amounts effective for this use will depend on, e.g., the particular composition administered, the manner of administration, the stage and severity of the disease being treated, the weight and general state of health of the patient, and the judgment of the prescribing physician.

[0229] The vaccine compositions of the invention may also be used purely as prophylactic agents. Generally the dosage for an initial prophylactic immunization generally occurs in a unit dosage range where the lower value is about 1, 5, 50, 500, or 1000 μg and the higher value is about 10,000; 20,000; 30,000; or 50,000 μg. Dosage values for a human typically range from about 500 μg to about 50,000 μg per 70 kilogram patient. This is followed by boosting dosages of between about 1.0 μg to about 50,000 μg of peptide administered at defined intervals from about four weeks to six months after the initial administration of vaccine. The immunogenicity of the vaccine may be assessed by measuring the specific activity of CTL and HTL obtained from a sample of the patient's blood.

[0230] As noted above, peptides comprising CTL and/or HTL epitopes of the invention induce immune responses when presented by HLA molecules and contacted with a CTL or HTL specific for an epitope comprised by the peptide. The manner in which the peptide is contacted with the CTL or HTL is not critical to the invention. For instance, the peptide can be contacted with the CTL or HTL either in vivo or in vitro. If the contacting occurs in vivo, the peptide itself can be administered to the patient, or other vehicles, e.g., DNA vectors encoding one or more peptides, viral vectors encoding the peptide(s), liposomes and the like, can be used, as described herein.

[0231] When the peptide is contacted in vitro, the vaccinating agent can comprise a population of cells, e.g., peptide-pulsed dendritic cells, or TAA-specific CTLs, which have been induced by pulsing antigen-presenting cells in vitro with the peptide. Such a cell population is subsequently administered to a patient in a therapeutically effective dose.

[0232] For pharmaceutical compositions, the immunogenic peptides of the invention, or DNA encoding them, are generally administered to an individual already diagnosed with cancer. The peptides or DNA encoding them can be administered individually or as fusions of one or more peptide sequences.

[0233] For therapeutic use, administration should generally begin at the first diagnosis of cancer. This is followed by boosting doses until at least symptoms are substantially abated and for a period thereafter. The embodiment of the vaccine composition (i.e., including, but not limited to embodiments such as peptide cocktails, polyepitopic polypeptides, minigenes, or TAA-specific CTLs) delivered to the patient may vary according to the stage of the disease. For example, a vaccine comprising TAA-specific CTLs may be more efficacious in killing tumor cells in patients with advanced disease than alternative embodiments.

[0234] The vaccine compositions of the invention may also be used therapeutically in combination with treatments such as surgery. An example is a situation in which a patient has undergone surgery to remove a primary tumor and the vaccine is then used to slow or prevent recurrence and/or metastasis.

[0235] Where susceptible individuals, e.g., individuals who may be diagnosed as being genetically pre-disposed to developing a particular type of tumor, are identified prior to diagnosis of cancer, the composition can be targeted to them, thus minimizing the need for administration to a larger population.

[0236] The dosage for an initial therapeutic immunization generally occurs in a unit dosage range where the lower value is about 1, 5, 50, 500, or 1,000 μg and the higher value is about 10,000; 20,000; 30,000; or 50,000 μg. Dosage values for a human typically range from about 500 μg to about 50,000 μg per 70 kilogram patient. Boosting dosages of between about 1.0 μg to about 50,000 μg of peptide pursuant to a boosting regimen over weeks to months may be administered depending upon the patient's response and condition as determined by measuring the specific activity of CTL and HTL obtained from the patient's blood. The peptides and compositions of the present invention may be employed in serious disease states, that is, life-threatening or potentially life threatening situations. In such cases, as a result of the minimal amounts of extraneous substances and the relative nontoxic nature of the peptides in preferred compositions of the invention, it is possible and may be felt desirable by the treating physician to administer substantial excesses of these peptide compositions relative to these stated dosage amounts.

[0237] Thus, for treatment of cancer, a representative dose is in the range disclosed above, namely where the lower value is about 1, 5, 50, 500, or 1,000 μg and the higher value is about 10,000; 20,000; 30,000; or 50,000 μg, preferably from about 500 μg to about 50,000 μg per 70 kilogram patient. Initial doses followed by boosting doses at established intervals, e.g., from four weeks to six months, may be required, possibly for a prolonged period of time to effectively immunize an individual. Administration should continue until at least clinical symptoms or laboratory tests indicate that the tumor has been eliminated or that the tumor cell burden has been substantially reduced and for a period thereafter. The dosages, routes of administration, and dose schedules are adjusted in accordance with methodologies known in the art.

[0238] The pharmaceutical compositions for therapeutic treatment are intended for parenteral, topical, oral, intrathecal, or local administration. Preferably, the pharmaceutical compositions are administered parentally, e.g., intravenously, subcutaneously, intradermally, or intramuscularly. Thus, the invention provides compositions for parenteral administration which comprise a solution of the immunogenic peptides dissolved or suspended in an acceptable carrier, preferably an aqueous carrier. A variety of aqueous carriers may be used, e.g., water, buffered water, 0.8% saline, 0.3% glycine, hyaluronic acid and the like. These compositions may be sterilized by conventional, well known sterilization techniques, or may be sterile filtered. The resulting aqueous solutions may be packaged for use as is, or lyophilized, the lyophilized preparation being combined with a sterile solution prior to administration. The compositions may contain pharmaceutically acceptable auxiliary substances as required to approximate physiological conditions, such as pH-adjusting and buffering agents, tonicity adjusting agents, wetting agents, preservatives, and the like, for example, sodium acetate, sodium lactate, sodium chloride, potassium chloride, calcium chloride, sorbitan monolaurate, triethanolamine oleate, etc.

[0239] The concentration of peptides of the invention in the pharmaceutical formulations can vary widely, i.e., from less than about 0.1%, usually at or at least about 2% to as much as 20% to 50% or more by weight, and will be selected primarily by fluid volumes, viscosities, etc., in accordance with the particular mode of administration selected.

[0240] A human unit dose form of the peptide composition is typically included in a pharmaceutical composition that comprises a human unit dose of an acceptable carrier, preferably an aqueous carrier, and is administered in a volume of fluid that is known by those of skill in the art to be used for administration of such compositions to humans (see, e.g., Remington's Pharmaceutical Sciences, 17^{th} Edition, A. Gennaro, Editor, Mack Publishing Co., Easton, Pa., 1985).

[0241] The peptides of the invention may also be administered via liposomes, which serve to target the peptides to a particular tissue, such as lymphoid tissue, or to target selectively to infected cells, as well as to increase the half-life of the peptide composition. Liposomes include emulsions, foams, micelles, insoluble monolayers, liquid crystals, phospholipid dispersions, lamellar layers and the like. In these preparations, the peptide to be delivered is incorporated as part of a liposome, alone or in conjunction with a molecule which binds to a receptor prevalent among lymphoid cells, such as monoclonal antibodies which bind to the CD45 antigen, or with other therapeutic or immunogenic compositions. Thus, liposomes either filled or decorated with a desired peptide of the invention can be directed to the site of lymphoid cells, where the liposomes then deliver the peptide compositions. Liposomes for use in accordance with the invention are formed from standard vesicle-forming lipids, which generally include neutral and negatively charged phospholipids and a sterol, such as cholesterol. The selection of lipids is generally guided by consideration of, e.g., liposome size, acid lability and stability of the liposomes in the blood stream. A variety of methods are available for preparing liposomes, as described in, e.g., Szoka, et al., Ann. Rev. Biophys. Bioeng. 9:467 (1980), and U.S. Pat. Nos. 4,235,871, 4,501,728, 4,837,028, and 5,019,369.

[0242] For targeting cells of the immune system, a ligand to be incorporated into the liposome can include, e.g., antibodies or fragments thereof specific for cell surface determinants of the desired immune system cells. A liposome suspension containing a peptide may be administered intravenously, locally, topically, etc. in a dose which varies according to, inter alia, the manner of administration, the peptide being delivered, and the stage of the disease being treated.

[0243] For solid compositions, conventional nontoxic solid carriers may be used which include, for example, pharmaceutical grades of mannitol, lactose, starch, magnesium stearate, sodium saccharin, talcum, cellulose, glucose, sucrose, magnesium carbonate, and the like. For oral administration, a pharmaceutically acceptable nontoxic composition is formed by incorporating any of the normally employed excipients, such as those carriers previously listed, and generally 10-95% of active ingredient, that is, one or more peptides of the invention, and more preferably at a concentration of 25%-75%.

[0244] For aerosol administration, the immunogenic peptides are preferably supplied in finely divided form along with a surfactant and propellant. Typical percentages of peptides are 0.01%-20% by weight, preferably 1%-10%. The surfactant must, of course, be nontoxic, and preferably soluble in the propellant. Representative of such agents are the esters or partial esters of fatty acids containing from 6 to 22 carbon atoms, such as caproic, octanoic, lauric, palmitic, stearic, linoleic, linolenic, olesteric and oleic acids with an aliphatic polyhydric alcohol or its cyclic anhydride. Mixed esters, such as mixed or natural glycerides may be employed. The surfactant may constitute 0.1%-20% by weight of the composition, preferably 0.25-5%. The balance of the composition is ordinarily propellant. A carrier can also be included, as desired, as with, e.g., lecithin for intranasal delivery.

[0245] IV.M. HLA Expression: IMPLICATIONS FOR T CELL-BASED IMMUNOTHERAPY

[0246] Disease Progression in Cancer and Infectious Disease

[0247] It is well recognized that a dynamic interaction between exists between host and disease, both in the cancer and infectious disease settings. In the infectious disease setting, it is well established that pathogens evolve during disease. The strains that predominate early in HIV infection are different from the ones that are associated with AIDS and later disease stages (NS versus S strains). It has long been hypothesized that pathogen forms that are effective in establishing infection may differ from the ones most effective in terms of replication and chronicity.

[0248] Similarly, it is widely recognized that the pathological process by which an individual succumbs to a neoplastic disease is complex. During the course of disease, many changes occur in cancer cells. The tumor accumulates alterations which are in part related to dysfunctional regulation of growth and differentiation, but also related to maximizing its growth potential, escape from drug treatment and/or the body's immunosurveillance. Neoplastic disease results in the accumulation of several different biochemical alterations of cancer cells, as a function of disease progression. It also results in significant levels of intra- and inter-cancer heterogeneity, particularly in the late, metastatic stage.

[0249] Familiar examples of cellular alterations affecting treatment outcomes include the outgrowth of radiation or chemotherapy resistant tumors during the course of therapy. These examples parallel the emergence of drug resistant viral strains as a result of aggressive chemotherapy, e.g., of chronic HBV and HIV infection, and the current resurgence of drug resistant organisms that cause Tuberculosis and Malaria. It appears that significant heterogeneity of responses is also associated with other approaches to cancer therapy, including anti-angiogenesis drugs, passive antibody immunotherapy, and active T cell-based immunotherapy. Thus, in view of such phenomena, epitopes from multiple disease-related antigens can be used in vaccines and therapeutics thereby counteracting the ability of diseased cells to mutate and escape treatment.

[0250] The Interplay Between Disease and the Immune System

[0251] One of the main factors contributing to the dynamic interplay between host and disease is the immune response mounted against the pathogen, infected cell, or malignant cell. In many conditions such immune responses control the disease. Several animal model systems and prospective studies of natural infection in humans suggest that immune responses against a pathogen can control the pathogen, prevent progression to severe disease and/or eliminate the pathogen. A common theme is the requirement for a multispecific T cell response, and that narrowly focused responses appear to be less effective. These observations guide skilled artisan as to embodiments of methods and compositions of the present invention that provide for a broad immune response.

[0252] In the cancer setting there are several findings that indicate that immune responses can impact neoplastic growth:

[0253] First, the demonstration in many different animal models, that anti-tumor T cells, restricted by MHC class 1, can prevent or treat tumors.

[0254] Second, encouraging results have come from immunotherapy trials.

[0255] Third, observations made in the course of natural disease correlated the type and composition of T cell infiltrate within tumors with positive clinical outcomes (Coulie PG, et al. Antitumor immunity at work in a melanoma patient In Advances in Cancer Research, 213-242, 1999).

[0256] Finally, tumors commonly have the ability to mutate, thereby changing their immunological recognition. For example, the presence of monospecific CTL was also correlated with control of tumor growth, until antigen loss emerged (Riker A, et al., Immune selection after antigen-specific immunotherapy of melanoma Surgery, August: 126(2):112-20, 1999; Marchand M, et al., Tumor regressions observed in patients with metastatic melanoma treated with an antigenic peptide encoded by gene MAGE-3 and presented by HLA-A1 Int. J. Cancer 80(2):219-30, Jan. 18, 1999). Similarly, loss of beta 2 microglobulin was detected in 5/13 lines established from melanoma patients after receiving immunotherapy at the NCI (Restifo NP, et al., Loss of functional Beta2—microglobulin in metastatic melanomas from five patients receiving immunotherapy Journal of the National Cancer Institute, Vol. 88 (2), 100-108, January 1996). It has long been recognized that HLA class I is frequently altered in various tumor types. This has led to a hypothesis that this phenomenon might reflect immune pressure exerted on the tumor by means of class I restricted CTL. The extent and degree of alteration in HLA class I expression appears to be reflective of past immune pressures, and may also have prognostic value (van Duinen SG, et al., Level of HLA antigens in locoregional metastases and clinical course of the disease in patients with melanoma Cancer Research 48, 1019-1025, February 1988; Möller P, et al., Influence of major histocompatibility complex class I and II antigens on survival in colorectal carcinoma Cancer Research 51, 729-736, January 1991). Taken together, these observations provide a rationale for immunotherapy of cancer and infectious disease, and suggest that effective strategies need to account for the complex series of pathological changes associated with disease.

[0257] The Three Main Types of Alterations in HLA Expression in Tumors and their Functional Significance

[0258] The level and pattern of expression of HLA class I antigens in tumors has been studied in many different tumor types and alterations have been reported in all types of tumors studied. The molecular mechanisms underlining HLA class I alterations have been demonstrated to be quite heterogeneous. They include alterations in the TAP/processing pathways, mutations of β-microglobulin and specific HLA heavy chains, alterations in the regulatory elements controlling over class I expression and loss of entire chromosome sections. There are several reviews on this topic, see, e.g.,: Garrido F, et al., Natural history of HLA expression during tumor development Immunol Today 14(10):491-499, 1993; Kaklamanis L, et al., Loss of HLA class-I alleles, heavy chains and β2-microglobulin in colorectal cancer Int. J. Cancer, 51(3):379-85, May 28, 1992. There are three main types of HLA Class I alteration (complete loss, allele-specific loss and decreased expression). The functional significance of each alteration is discussed separately:

[0259] Complete Loss of HLA Expression

[0260] Complete loss of HLA expression can result from a variety of different molecular mechanisms, reviewed in (Algarra I, et al., The HLA crossroad in tumor immunology Human Immunology 61, 65-73, 2000; Browning M, et al., Mechanisms of loss of HLA class I expression on colorectal tumor cells Tissue Antigens 47:364-371, 1996; Ferrone S, et al., Loss of HLA class I antigens by melanoma cells: molecular mechanisms, functional significance and clinical relevance Immunology Today, 16(10): 487-494, 1995; Garrido F, et al., Natural history of HLA expression during tumor development Immunology Today 14(10):491-499, 1993; Tait, BD, HLA Class I expression on human cancer cells: Implications for effective immunotherapy Hum Immunol 61, 158-165, 2000). In functional terms, this type of alteration has several important implications.

[0261] While the complete absence of class I expression will eliminate CTL recognition of those tumor cells, the loss of HLA class I will also render the tumor cells extraordinary sensitive to lysis from NK cells (Ohnmacht, Ga., et al., Heterogeneity in expression of human leukocyte antigens and melanoma-associated antigens in advanced melanoma J Cellular Phys 182:332-338, 2000; Liunggren H G, et al., Host resistance directed selectively against H-2 deficient lymphoma variants: Analysis of the mechanism J. Exp. Med., December 1;162(6):1745-59, 1985; Maio M, et al, Reduction in susceptibility to natural killer cell-mediated lysis of human FO-1 melanoma cells after induction of HLA class I antigen expression by transfection with B2m gene J. Clin. Invest. 88(1):282-9, July 1991; Schrier P I, et al., Relationship between myc oncogene activation and MHC class I expression Adv. Cancer Res., 60:181-246, 1993).

[0262] The complementary interplay between loss of HLA expression and gain in NK sensitivity is exemplified by the classic studies of Coulie and coworkers (Coulie, P G, et al., Antitumor immunity at work in a melanoma patient. In Advances in Cancer Research, 213-242, 1999) which described the evolution of a patient's immune response over the course of several years. Because of increased sensitivity to NK lysis, it is predicted that approaches leading to stimulation of innate immunity in general and NK activity in particular would be of special significance. An example of such approach is the induction of large amounts of dendritic cells (DC) by various hematopoietic growth factors, such as Flt3 ligand or ProGP. The rationale for this approach resides in the well known fact that dendritic cells produce large amounts of IL-12, one of the most potent stimulators for innate immunity and NK activity in particular. Alternatively, IL-12 is administered directly, or as nucleic acids that encode it. In this light, it is interesting to note that Flt3 ligand treatment results in transient tumor regression of a class I negative prostate murine cancer model (Ciavarra R P, et al., Flt3-Ligand induces transient tumor regression in an ectopic treatment model of major histocompatibility complex-negative prostate cancer Cancer Res 60:2081-84, 2000). In this context, specific anti-tumor vaccines in accordance with the invention synergize with these types of hematopoietic growth factors to facilitate both CTL and NK cell responses, thereby appreciably impairing a cell's ability to mutate and thereby escape efficacious treatment. Thus, an embodiment of the present invention comprises a composition of the invention together with a method or composition that augments functional activity or numbers of NK cells. Such an embodiment can comprise a protocol that provides a composition of the invention sequentially with an NK-inducing modality, or contemporaneous with an NK-inducing modality.

[0263] Secondly, complete loss of HLA frequently occurs only in a fraction of the tumor cells, while the remainder of tumor cells continue to exhibit normal expression. In functional terms, the tumor would still be subject, in part, to direct attack from a CTL response; the portion of cells lacking HLA subject to an NK response. Even if only a CTL response were used, destruction of the HLA expressing fraction of the tumor has dramatic effects on survival times and quality of life.

[0264] It should also be noted that in the case of heterogeneous HLA expression, both normal HLA-expressing as well as defective cells are predicted to be susceptible to immune destruction based on “bystander effects.” Such effects were demonstrated, e.g., in the studies of Rosendahl and colleagues that investigated in vivo mechanisms of action of antibody targeted superantigens (Rosendahl A, et al., Perforin and IFN-gamma are involved in the antitumor effects of antibody-targeted superantigens J. Immunol. 160(11):5309-13, Jun. 1, 1998). The bystander effect is understood to be mediated by cytokines elicited from, e.g., CTLs acting on an HLA-bearing target cell, whereby the cytokines are in the environment of other diseased cells that are concomitantly killed.

[0265] Allele-Specific Loss

[0266] One of the most common types of alterations in class I molecules is the selective loss of certain alleles in individuals heterozygous for HLA. Allele-specific alterations might reflect the tumor adaptation to immune pressure, exerted by an immunodominant response restricted by a single HLA restriction element. This type of alteration allows the tumor to retain class I expression and thus escape NK cell recognition, yet still be susceptible to a CTL-based vaccine in accordance with the invention which comprises epitopes corresponding to the remaining HLA type. Thus, a practical solution to overcome the potential hurdle of allele-specific loss relies on the induction of multispecific responses. Just as the inclusion of multiple disease-associated antigens in a vaccine of the invention guards against mutations that yield loss of a specific disease antigens, simultaneously targeting multiple HLA specificities and multiple disease-related antigens prevents disease escape by allele-specific losses.

[0267] Decrease in Expression (Allele-Specific or not)

[0268] The sensitivity of effector CTL has long been demonstrated (Brower, R C, et al., Minimal requirements for peptide mediated activation of CD8+ CTL Mol. Immunol., 31;1285-93, 1994; Chriustnick, E T, et al. Low numbers of MHC class I-peptide complexes required to trigger a T cell response Nature 352:67-70, 1991; Sykulev, Y, et al., Evidence that a single peptide-MHC complex on a target cell can elicit a cytolytic T cell response Immunity, 4(6):565-71, June 1996). Even a single peptide/MHC complex can result in tumor cells lysis and release of anti-tumor lymphokines. The biological significance of decreased HLA expression and possible tumor escape from immune recognition is not fully known. Nevertheless, it has been demonstrated that CTL recognition of as few as one MHC/peptide complex is sufficient to lead to tumor cell lysis.

[0269] Further, it is commonly observed that expression of HLA can be upregulated by gamma IFN, commonly secreted by effector CTL. Additionally, HLA class I expression can be induced in vivo by both alpha and beta IFN (Halloran, et al., Local T cell responses induce widespread MHC expression. J Immunol 148:3837, 1992; Pestka, S, et al., Interferons and their actions Annu. Rev. Biochem. 56:727-77, 1987). Conversely, decreased levels of HLA class I expression also render cells more susceptible to NK lysis.

[0270] With regard to gamma IFN, Torres et al (Torres, M J, et al., Loss of an HLA haplotype in pancreas cancer tissue and its corresponding tumor derived cell line. Tissue Antigens 47:372-81, 1996) note that HLA expression is upregulated by gamma IFN in pancreatic cancer, unless a total loss of haplotype has occurred. Similarly, Rees and Mian note that allelic deletion and loss can be restored, at least partially, by cytokines such as IFN-gamma (Rees, R., et al. Selective MHC expression in tumors modulates adaptive and innate antitumor responses Cancer Immunol Immunother 48:374-81, 1999). It has also been noted that IFN-gamma treatment results in upregulation of class I molecules in the majority of the cases studied (Browning M, et al., Mechanisms of loss of HLA class I expression on colorectal tumor cells. Tissue Antigens 47:364-71, 1996). Kaklamakis, et al. also suggested that adjuvant immunotherapy with IFN-gamma may be beneficial in the case of HLA class I negative tumors (Kaklarahis L, Loss of transporter in antigen processing I transport protein and major histocompatibility complex class I molecules in metastatic versus primary breast cancer. Cancer Research 55:5191-94, November 1995). It is important to underline that IFN-gamma production is induced and self-amplified by local inflammation/immunization (Halloran, et al. Local T cell responses induce widespread MHC expression J. Immunol 148:3837, 1992), resulting in large increases in MHC expressions even in sites distant from the inflammatory site.

[0271] Finally, studies have demonstrated that decreased HLA expression can render tumor cells more susceptible to NK lysis (Ohnmacht, Ga., et al., Heterogeneity in expression of human leukocyte antigens and melanoma-associated antigens in advanced melanoma J Cellular Phys 182:332-38, 2000; Liunggren H G, et al., Host resistance directed selectively against H-2 deficient lymphoma variants: Analysis of the mechanism J Exp. Med., 162(6):1745-59, Dec.1, 1985; Maio M, et al., Reduction in susceptibility to natural killer cell-mediated lysis of human FO-1 melanoma cells after induction of HLA class I antigen expression by transfection with β2m gene J Clin. Invest. 88(1):282-9, July 1991; Schrier PI, et al., Relationship between myc oncogene activation and MHC class I expression Adv. Cancer Res., 60:181-246, 1993). If decreases in HLA expression benefit a tumor because it facilitates CTL escape, but render the tumor susceptible to NK lysis, then a minimal level of HLA expression that allows for resistance to NK activity would be selected for (Garrido F, et al., Implications for immunosurveillance of altered HLA class I phenotypes in human tumors Immunol Today 18(2):89-96, February 1997). Therefore, a therapeutic compositions or methods in accordance with the invention together with a treatment to upregulate HLA expression and/or treatment with high affinity T-cells renders the tumor sensitive to CTL destruction.

[0272] Frequency of Alterations in HLA Expression

[0273] The frequency of alterations in class I expression is the subject of numerous studies (Algarra I, et al., The HLA crossroad in tumor immunology Human Immunology 61, 65-73, 2000). Rees and Mian estimate allelic loss to occur overall in 3-20% of tumors, and allelic deletion to occur in 15-50% of tumors. It should be noted that each cell carries two separate sets of class I genes, each gene carrying one HLA-A and one HLA-B locus. Thus, fully heterozygous individuals carry two different HLA-A molecules and two different HLA-B molecules. Accordingly, the actual frequency of losses for any specific allele could be as little as one quarter of the overall frequency. They also note that, in general, a gradient of expression exists between normal cells, primary tumors and tumor metastasis. In a study from Natali and coworkers (Natali P G, et al., Selective changes in expression of HLA class I polymorphic determinants in human solid tumors PNAS USA 86:6719-6723, September 1989), solid tumors were investigated for total HLA expression, using W6/32 antibody, and for allele-specific expression of the A2 antigen, as evaluated by use of the BB7.2 antibody. Tumor samples were derived from primary cancers or metastasis, for 13 different tumor types, and scored as negative if less than 20%, reduced if in the 30-80% range, and normal above 80%. All tumors, both primary and metastatic, were HLA positive with W6/32. In terms of A2 expression, a reduction was noted in 16.1% of the cases, and A2 was scored as undetectable in 39.4% of the cases. Garrido and coworkers (Garrido F, et al., Natural history of HLA expression during tumour development Immunol Today 14(10):491-99, 1993) emphasize that HLA changes appear to occur at a particular step in the progression from benign to most aggressive. Jimninez et al (Jiminez P, et al., Microsatellite instability analysis in tumors with different mechanisms for total loss of HLA expression. Cancer Immunol Immunother 48:684-90, 2000) have analyzed 118 different tumors (68 colorectal, 34 laryngeal and 16 melanomas). The frequencies reported for total loss of HLA expression were 11% for colon, 18% for melanoma and 13% for larynx. Thus, HLA class I expression is altered in a significant fraction of the tumor types, possibly as a reflection of immune pressure, or simply a reflection of the accumulation of pathological changes and alterations in diseased cells.

[0274] Immunotherapy in the Context of HLA Loss

[0275] A majority of the tumors express HLA class I, with a general tendency for the more severe alterations to be found in later stage and less differentiated tumors. This pattern is encouraging in the context of immunotherapy, especially considering that: 1) the relatively low sensitivity of immunohistochemical techniques might underestimate HLA expression in tumors; 2) class I expression can be induced in tumor cells as a result of local inflammation and lymphokine release; and, 3) class I negative cells are sensitive to lysis by NK cells.

[0276] Accordingly, various embodiments of the present invention can be selected in view of the fact that there can be a degree of loss of HLA molecules, particularly in the context of neoplastic disease. For example, the treating physician can assay a patient's tumor to ascertain whether HLA is being expressed. If a percentage of tumor cells express no class I HLA, then embodiments of the present invention that comprise methods or compositions that elicit NK cell responses can be employed. As noted herein, such NK-inducing methods or composition can comprise a Flt3 ligand or ProGP which facilitate mobilization of dendritic cells, the rationale being that dendritic cells produce large amounts of IL-12. IL-12 can also be administered directly in either amino acid or nucleic acid form. It should be noted that compositions in accordance with the invention can be administered concurrently with NK cell-inducing compositions, or these compositions can be administered sequentially.

[0277] In the context of allele-specific HLA loss, a tumor retains class I expression and may thus escape NK cell recognition, yet still be susceptible to a CTL-based vaccine in accordance with the invention which comprises epitopes corresponding to the remaining HLA type. The concept here is analogous to embodiments of the invention that include multiple disease antigens to guard against mutations that yield loss of a specific antigen. Thus, one can simultaneously target multiple HLA specificities and epitopes from multiple disease-related antigens to prevent tumor escape by allele-specific loss as well as disease-related antigen loss. In addition, embodiments of the present invention can be combined with alternative therapeutic compositions and methods. Such alternative compositions and methods comprise, without limitation, radiation, cytotoxic pharmaceuticals, and/or compositions/methods that induce humoral antibody responses.

[0278] Moreover, it has been observed that expression of HLA can be upregulated by gamma IFN, which is commonly secreted by effector CTL, and that HLA class I expression can be induced in vivo by both alpha and beta IFN. Thus, embodiments of the invention can also comprise alpha, beta and/or gamma IFN to facilitate upregulation of HLA.

[0279] IV.N. REPRIEVE PERIODS FROM THERAPIES THAT INDUCE SIDE EFFECTS: “SCHEDULED TREATMENT INTERRUPTIONS OR DRUG HOLIDAYS”

[0280] Recent evidence has shown that certain patients infected with a pathogen, whom are initially treated with a therapeutic regimen to reduce pathogen load, have been able to maintain decreased pathogen load when removed from the therapeutic regimen, i.e., during a “drug holiday” (Rosenberg, E., et al., Immune control of HIV-1 after early treatment of acute infection Nature 407:523-26, Sept. 28, 2000) As appreciated by those skilled in the art, many therapeutic regimens for both pathogens and cancer have numerous, often severe, side effects. During the drug holiday, the patient's immune system is keeping the disease in check. Methods for using compositions of the invention are used in the context of drug holidays for cancer and pathogenic infection.

[0281] For treatment of an infection, where therapies are not particularly immunosuppressive, compositions of the invention are administered concurrently with the standard therapy. During this period, the patient's immune system is directed to induce responses against the epitopes comprised by the present inventive compositions. Upon removal from the treatment having side effects, the patient is primed to respond to the infectious pathogen should the pathogen load begin to increase. Composition of the invention can be provided during the drug holiday as well.

[0282] For patients with cancer, many therapies are immunosuppressive. Thus, upon achievement of a remission or identification that the patient is refractory to standard treatment, then upon removal from the immunosuppressive therapy, a composition in accordance with the invention is administered. Accordingly, as the patient's immune system reconstitutes, precious immune resources are simultaneously directed against the cancer. Composition of the invention can also be administered concurrently with an immunosuppressive regimen if desired.

[0283] IV.O. KITS

[0284] The peptide and nucleic acid compositions of this invention can be provided in kit form together with instructions for vaccine administration. Typically the kit would include desired peptide compositions in a container, preferably in unit dosage form and instructions for administration. An alternative kit would include a minigene construct with desired nucleic acids of the invention in a container, preferably in unit dosage form together with instructions for administration. Lymphokines such as IL-2 or IL-12 may also be included in the kit. Other kit components that may also be desirable include, for example, a sterile syringe, booster dosages, and other desired excipients.

[0285] IV.P. OVERVIEW

[0286] Epitopes in accordance with the present invention were successfully used to induce an immune response. Immune responses with these epitopes have been induced by administering the epitopes in various forms. The epitopes have been administered as peptides, as nucleic acids, and as viral vectors comprising nucleic acids that encode the epitope(s) of the invention. Upon administration of peptide-based epitope forms, immune responses have been induced by direct loading of an epitope onto an empty HLA molecule that is expressed on a cell, and via internalization of the epitope and processing via the HLA class I pathway; in either event, the HLA molecule expressing the epitope was then able to interact with and induce a CTL response. Peptides can be delivered directly or using such agents as liposomes. They can additionally be delivered using ballistic delivery, in which the peptides are typically in a crystalline form. When DNA is used to induce an immune response, it is administered either as naked DNA, generally in a dose range of approximately 1-5 mg, or via the ballistic “gene gun” delivery, typically in a dose range of approximately 10-100 μg. The DNA can be delivered in a variety of conformations, e.g., linear, circular etc. Various viral vectors have also successfully been used that comprise nucleic acids which encode epitopes in accordance with the invention.

[0287] Accordingly compositions in accordance with the invention exist in several forms. Embodiments of each of these composition forms in accordance with the invention have been successfully used to induce an immune response.

[0288] One composition in accordance with the invention comprises a plurality of peptides. This plurality or cocktail of peptides is generally admixed with one or more pharmaceutically acceptable excipients. The peptide cocktail can comprise multiple copies of the same peptide or can comprise a mixture of peptides. The peptides can be analogs of naturally occurring epitopes. The peptides can comprise artificial amino acids and/or chemical modifications such as addition of a surface active molecule, e.g., lipidation; acetylation, glycosylation, biotinylation, phosphorylation etc. The peptides can be CTL or HTL epitopes. In a preferred embodiment the peptide cocktail comprises a plurality of different CTL epitopes and at least one HTL epitope. The HTL epitope can be naturally or non-naturally (e.g., PADRE®, Epimmune Inc., San Diego, Calif.). The number of distinct epitopes in an embodiment of the invention is generally a whole unit integer from one through two hundred (e.g., 1, 2, 3, 4, 5, 6, 7, 8, 9, 10, 11, 12, 13, 14, 15, 16, 17, 18, 19, 20, 21, 22, 23, 24, 25, 26, 27, 28, 29, 30, 31, 32, 33, 34, 35, 36, 37, 38, 39, 40, 41, 42, 43, 44, 45, 46, 47, 48, 49, 50, 51, 52, 53, 54, 55, 56, 57, 58, 59, 60, 61, 62, 63, 64, 65, 66, 67, 68, 69, 70, 71, 72, 73, 74, 75, 76, 77, 78, 79, 80, 81, 82, 83, 84, 85, 86, 87, 88, 89, 90, 91, 92, 93, 94, 95, 96, 97, 98, 99, 100, 101, 102, 103, 104, 105, 105, 107, 108, 109, 110, 111, 112, 113, 114, 115, 116, 117, 118, 119, 120, 121, 122, 123, 124, 125, 126, 127, 128, 129, 130, 131, 132, 133, 134, 135, 136, 137, 138, 139, 140, 141, 142, 143, 144, 145, 146, 147, 148, 149, 150, 151, 152, 153, 154, 155, 156, 157, 158, 159, 160, 161, 162, 163, 164, 165, 166, 167, 168, 169, 170, 171, 172, 173, 174, 175, 176, 177, 178, 179, 180, 181, 182, 183, 184, 185, 186, 187, 188, 189, 190, 191, 192, 193, 194, 195, 196, 197, 198, 199, 200).

[0289] An additional embodiment of a composition in accordance with the invention comprises a polypeptide multi-epitope construct, i.e., a polyepitopic peptide. Polyepitopic peptides in accordance with the invention are prepared by use of technologies well-known in the art. By use of these known technologies, epitopes in accordance with the invention are connected one to another. The polyepitopic peptides can be linear or non-linear, e.g., multivalent. These polyepitopic constructs can comprise artificial amino acids, spacing or spacer amino acids, flanking amino acids, or chemical modifications between adjacent epitope units. The polyepitopic construct can be a heteropolymer or a homopolymer. The polyepitopic constructs generally comprise epitopes in a quantity of any whole unit integer between 2-200 (e.g., 2, 3, 4, 5, 6, 7, 8, 9, 10, 11, 12, 13, 14, 15, 16, 17, 18, 19, 20, 21, 22, 23, 24, 25, 26, 27, 28, 29, 30, 31, 32, 33, 34, 35, 36, 37, 38, 39, 40, 41, 42, 43, 44, 45, 46, 47, 48, 49, 50, 51, 52, 53, 54, 55, 56, 57, 58, 59, 60, 61, 62, 63, 64, 65, 66, 67, 68, 69, 70, 71, 72, 73, 74, 75, 76, 77, 78, 79, 80, 81, 82, 83, 84, 85, 86, 87, 88, 89, 90, 91, 92, 93, 94, 95, 96, 97, 98, 99, 100, etc.). The polyepitopic construct can comprise CTL and/or HTL epitopes. One or more of the epitopes in the construct can be modified, e.g., by addition of a surface active material, e.g. a lipid, or chemically modified, e.g., acetylation, etc. Moreover, bonds in the multiepitopic construct can be other than peptide bonds, e.g., covalent bonds, ester or ether bonds, disulfide bonds, hydrogen bonds, ionic bonds etc.

[0290] Alternatively, a composition in accordance with the invention comprises construct which comprises a series, sequence, stretch, etc., of amino acids that have homology to ( ie., corresponds to or is contiguous with) to a native sequence. This stretch of amino acids comprises at least one subsequence of amino acids that, if cleaved or isolated from the longer series of amino acids, functions as an HLA class I or HLA class II epitope in accordance with the invention. In this embodiment, the peptide sequence is modified, so as to become a construct as defined herein, by use of any number of techniques known or to be provided in the art. The polyepitopic constructs can contain homology to a native sequence in any whole unit integer increment from 70-100%, e.g., 70, 71, 72, 73, 74, 75, 76, 77, 78, 79, 80, 81, 82, 83, 84, 85, 86, 87, 88, 89, 90, 91, 92, 93, 94, 95, 96, 97, 98, 99, or, 100 percent.

[0291] A further embodiment of a composition in accordance with the invention is an antigen presenting cell that comprises one or more epitopes in accordance with the invention. The antigen presenting cell can be a “professional” antigen presenting cell, such as a dendritic cell. The antigen presenting cell can comprise the epitope of the invention by any means known or to be determined in the art. Such means include pulsing of dendritic cells with one or more individual epitopes or with one or more peptides that comprise multiple epitopes, by nucleic acid administration such as ballistic nucleic acid delivery or by other techniques in the art for administration of nucleic acids, including vector-based, e.g. viral vector, delivery of nucleic acids.

[0292] Further embodiments of compositions in accordance with the invention comprise nucleic acids that encode one or more peptides of the invention, or nucleic acids which encode a polyepitopic peptide in accordance with the invention. As appreciated by one of ordinary skill in the art, various nucleic acids compositions will encode the same peptide due to the redundancy of the genetic code. Each of these nucleic acid compositions falls within the scope of the present invention. This embodiment of the invention comprises DNA or RNA, and in certain embodiments a combination of DNA and RNA. It is to be appreciated that any composition comprising nucleic acids that will encode a peptide in accordance with the invention or any other peptide based composition in accordance with the invention, falls within the scope of this invention.

[0293] It is to be appreciated that peptide-based forms of the invention (as well as the nucleic acids that encode them) can comprise analogs of epitopes of the invention generated using priniciples already known, or to be known, in the art. Principles related to analoging are now known in the art, and are disclosed herein; moreover, analoging principles (heteroclitic analoging) are disclosed in co-pending application serial number U.S. Ser. No. 09/226,775 filed Jan. 6, 1999. Generally the compositions of the invention are isolated or purified.

[0294] The invention will be described in greater detail by way of specific examples. The following examples are offered for illustrative purposes, and are not intended to limit the invention in any manner. Those of skill in the art will readily recognize a variety of non-critical parameters that can be changed or modified to yield alternative embodiments in accordance with the invention.

### V. EXAMPLES

[0295] The following examples illustrate identification, selection, and use of immunogenic Class I and Class II peptide epitopes for inclusion in vaccine compositions.

### Example 1

[0296] HLA Class I and Class II Binding Assays

[0297] The following example of peptide binding to HLA molecules demonstrates quantification of binding affinities of HLA class I and class II peptides. Binding assays can be performed with peptides that are either motif-bearing or not motif-bearing.

[0298] HLA class I and class II binding assays using purified HLA molecules were performed in accordance with disclosed protocols (e.g., PCT publications WO 94/20127 and WO 94/03205; Sidney et al., Current Protocols in Immunology 18.3.1 (1998); Sidney, et al., J. Immunol. 154:247 (1995); Sette, et al, Mol. Immunol. 31:813 (1994)). Briefly, purified MHC molecules (5 to 500 nM) were incubated with various unlabeled peptide inhibitors and 1-10 nM ¹²⁵I-radiolabeled probe peptides as described. Following incubation, MHC-peptide complexes were separated from free peptide by gel filtration and the fraction of peptide bound was determined. Typically, in preliminary experiments, each MHC preparation was titered in the presence of fixed amounts of radiolabeled peptides to determine the concentration of HLA molecules necessary to bind 10-20% of the total radioactivity. All subsequent inhibition and direct binding assays were performed using these HLA concentrations.

[0299] Since under these conditions [label]<[HLA] and IC₅₀>[HLA], the measured IC₅₀ values are reasonable approximations of the true K_{D} values. Peptide inhibitors are typically tested at concentrations ranging from 120 μg/ml to 1.2 ng/ml, and are tested in two to four completely independent experiments. To allow comparison of the data obtained in different experiments, a relative binding figure is calculated for each peptide by dividing the IC₅₀ of a positive control for inhibition by the IC₅₀ for each tested peptide (typically unlabeled versions of the radiolabeled probe peptide). For database purposes, and inter-experiment comparisons, relative binding values are compiled. These values can subsequently be converted back into IC₅₀ nM values by dividing the IC₅₀ nM of the positive controls for inhibition by the relative binding of the peptide of interest. This method of data compilation has proven to be the most accurate and consistent for comparing peptides that have been tested on different days, or with different lots of purified MHC.

[0300] Binding assays as outlined above can be used to analyze supermotif and/or motif-bearing epitopes as, for example, described in Example 2.

### Example 2

[0301] Identification of HLA Supermotif- and Motif-Bearing CTL Candidate Epitopes

[0302] Vaccine compositions of the invention may include multiple epitopes that comprise multiple HLA supermotifs or motifs to achieve broad population coverage. This example illustrates the identification of supermotif- and motif-bearing epitopes for the inclusion in such a vaccine composition. Calculation of population coverage is performed using the strategy described below.

[0303] Computer Searches and Algorithms for Identification of Supermotif and/or Motif-Bearing Epitopes

[0304] The searches performed to identify the motif-bearing peptide sequences in Examples 2 and 5 employed protein sequence data for the tumor-associated antigens MAGE2/3.

[0305] Computer searches for epitopes bearing RLA Class I or Class II supermotifs or motifs were performed as follows. All translated protein sequences were analyzed using a text string search software program, e.g., MotifSearch 1.4 (D. Brown, San Diego) to identify potential peptide sequences containing appropriate HLA binding motifs; alternative programs are readily produced in accordance with information in the art in view of the motif/supermotif disclosure herein. Furthermore, such calculations can be made mentally. Identified A2-, A3-, and DR-supermotif sequences were scored using polynomial algorithms to predict their capacity to bind to specific HLA-Class I or Class II molecules. These polynomial algorithms take into account both extended and refined motifs (that is, to account for the impact of different amino acids at different positions), and are essentially based on the premise that the overall affinity (or ΔG) of peptide-HLA molecule interactions can be approximated as a linear polynomial function of the type:

“ΔG”=a₁ᵢ×a₂ᵢ×a₃ᵢ . . . ×aₙᵢ

[0306] where aⱼᵢ is a coefficient which represents the effect of the presence of a given amino acid (j) at a given position (i) along the sequence of a peptide of n amino acids. The crucial assumption of this method is that the effects at each position are essentially independent of each other (i.e., independent binding of individual side-chains). When residue j occurs at position i in the peptide, it is assumed to contribute a constant amount jᵢ to the free energy of binding of the peptide irrespective of the sequence of the rest of the peptide. This assumption is justified by studies from our laboratories that demonstrated that peptides are bound to MHC and recognized by T cells in essentially an extended conformation (data omitted herein).

[0307] The method of derivation of specific algorithm coefficients has been described in Gulukota et al., J. Mol. Biol. 267:1258-126, 1997; (see also Sidney et al., Human Immunol. 45:79-93, 1996; and Southwood et al., J. Immunol. 160:3363-3373, 1998). Briefly, for all i positions, anchor and non-anchor alike, the geometric mean of the average relative binding (ARB) of all peptides carrying j is calculated relative to the remainder of the group, and used as the estimate of jᵢ. For Class II peptides, if multiple alignments are possible, only the highest scoring alignment is utilized, following an iterative procedure. To calculate an algorithm score of a given peptide in a test set, the ARB values corresponding to the sequence of the peptide are multiplied. If this product exceeds a chosen threshold, the peptide is predicted to bind. Appropriate thresholds are chosen as a function of the degree of stringency of prediction desired.

[0308] Selection of HLA-A2 Supertype Cross-Reactive Peptides

[0309] The complete protein sequences from MAGE2/3 were scanned, utilizing motif identification software, to identify 8-, 9-, 10-, and 1-mer sequences containing the HLA-A2-supermotif main anchor specificity.

[0310] A total of 285 HLA-A2 supermotif-positive sequences were identified within the MAGE2 and/or MAGE3 protein sequences. Of these, 137 of the corresponding peptides were synthesized and tested for the capacity to bind purified HLA-A*0201 molecules in vitro (HLA-A*0201 is considered a prototype A2 supertype molecule). Nineteen of the peptides bound A*0201 with IC₅₀ values ≦500 nM.

[0311] The 19 A*0201-binding peptides were subsequently tested for the capacity to bind to additional A2-supertype molecules (A*0202, A*0203, A*0206, and A*6802). As shown in Table XXII, 17 of the 19 peptides were found to be A2-supertype cross-reactive binders, binding at least three of the five A2-supertype alleles tested.

[0312] Selection of HLA-A3 Supermotif-Bearing Epitopes

[0313] The protein sequences scanned above are also examined for the presence of peptides with the HLA-A3-supermotif primary anchors using methodology similar to that performed to identify HLA-A2 supermotif-bearing epitopes.

[0314] Peptides corresponding to the supermotif-bearing sequences are then synthesized and tested for binding to HLA-A*0301 and HLA-A*1101 molecules, the two most prevalent A3-supertype alleles. The peptides that are found to bind one of the two alleles with binding affinities of ≦500 nM are then tested for binding cross-reactivity to the other common A3-supertype alleles (A*3101, A*3301, and A*6801) to identify those that can bind at least three of the five HLA-A3-supertype molecules tested. Examples of HLA-A3 cross-binding supermotif-bearing peptides identified in accordance with this procedure are provided in Table XXIII.

[0315] Selection of HLA-B7 Supermotif Bearing Epitopes

[0316] The same target antigen protein sequences are also analyzed to identify HLA-B7-supermotif-bearing sequences. The corresponding peptides are then synthesized and tested for binding to HLA-B*0702, the most common B7-supertype allele (i.e., the prototype B7 supertype allele). Those peptides that bind B*0702 with IC₅₀ of ≦500 nM are then tested for binding to other common B7-supertype molecules (B*3501, B*5101, B*5301, and B*5401) to identify those peptides that are capable of binding to three or more of the five B7-supertype alleles tested. Examples of HLA-B7 cross-binding supermotif-bearing peptides identified in accordance with this procedure are provided in Table XXIV.

[0317] Selection of A1and A24 Motif-Bearing Epitopes

[0318] To further increase population coverage, HLA-A1 and -A24 motif-bearing epitopes can also be incorporated into potential vaccine constructs. An analysis of the protein sequence data from the target antigen utilized above is also performed to identify HLA-A1- and A24-motif-containing conserved sequences. The corresponding peptide sequence are then synthesized and tested for binding to the appropriate allele-specific HLA molecule, HLA-1 or HLA-24. Peptides are identified that bind to the allele-specific HLA molecules at an IC₅₀ of ≦500 nM. Examples of peptides identified in accordance with this procedure are provided in Tables XXV and XXVI.

### Example 3

[0319] Confirmation of Immunogenicity

[0320] Motif analysis and binding studies described in Example 2 identified seventeen potential epitopes for both MAGE2 and MAGE3. Four of the peptide are, however, identical in both MAGE2 and 3, and therefore do not represent distinct epitopes. Peptides were selected for in vitro immunogenicity testing. Testing was performed using the following methodology:

[0321] Target Cell Lines for Cellular Screening:

[0322] The 0.221A2.1 cell line, produced by transferring the HLA-A2.1 gene into the HLA-A, -B, -C null mutant human B-lymphoblastoid cell line 721.221, was used as the peptide-loaded target to measure activity of HLA-A2.1-restricted CTL. The HLA-typed melanoma cell lines (624 mel and 888 mel) were obtained from Y. Kawakami and S. Rosenberg, National Cancer Institute, Bethesda, Md. The cell lines were maintained in RPMI-1640 medium supplemented with antibiotics, sodium pyruvate, nonessential amino acids and 10% (v/v) heat inactivated FCS. The melanoma cells were treated with 100 U/ml IFNγ (Genzyme) for 48 hours at 37° C. before use as targets in the ⁵¹Cr release and in situ IFNγ assays.

[0323] Primary CTL Induction Cultures:

[0324] Generation of Dendritic Cells (DC): PBMCs were thawed in RPMI with 30 μg/ml DNAse, washed twice and resuspended in complete medium (RPMI-1640 plus 5% AB human serum, non-essential amino acids, sodium pyruvate, L-glutamine and penicillin/streptomycin). The monocytes were purified by plating 10×10⁶ PBMC/well in a 6-well plate. After 2 hours at 37° C., the non-adherent cells were removed by gently shaking the plates and aspirating the supernatants. The wells were washed a total of three times with 3 ml RPMI to remove most of the non-adherent and loosely adherent cells. Three ml of complete medium containing 50 ng/ml of GM-CSF and 1,000 U/ml of IL4 were then added to each well. DC were used for CTL induction cultures following 7 days of culture.

[0325] Induction of CTL with DC and Peptide: CD8+ T-cells were isolated by positive selection with Dynal immunomagnetic beads (Dynabeads® M-450) and the detacha-bead® reagent. Typically about 200-250×10⁶ PBMC were processed to obtain 24×10⁶ CD8⁺ T-cells (enough for a 48-well plate culture). Briefly, the PBMCs were thawed in RPMI with 30 μg/ml DNAse, washed once with PBS containing 1% human AB serum and resuspended in PBS/1% AB serum at a concentration of 20×10⁶ cells/ml. The magnetic beads were washed 3 times with PBS/AB serum, added to the cells (140 μl beads/20×10⁶ cells) and incubated for 1 hour at 4° C. with continuous mixing. The beads and cells were washed 4× with PBS/AB serum to remove the nonadherent cells and resuspended at 100×10⁶ cells/ml (based on the original cell number) in PBS/AB serum containing 100 μ/ml detacha-bead® reagent and 30 μg/ml DNAse. The mixture is incubated for 1 hour at room temperature with continuous mixing. The beads were washed again with PBS/AB/DNAse to collect the CD8+ T-cells. The DC were collected and centrifuged at 1300 rpm for 5-7 minutes, washed once with PBS with 1% BSA, counted and pulsed with 40 μg/ml of peptide at a cell concentration of 1-2×10⁶/ml in the presence of 3 μg/ml β₂- microglobulin for 4 hours at 20° C. The DC were then irradiated (4,200 rads), washed 1 time with medium and counted again.

[0326] Setting up induction cultures: 0.25 ml cytokine-generated DC (@1×10⁵ cells/ml) were co-cultured with 0.25 ml of CD8+ T-cells (@2×10⁶ cell/ml) in each well of a 48-well plate in the presence of 10 ng/ml of IL-7. rHuman IL10 was added the next day at a final concentration of 10 ng/ml and rhuman IL2 was added 48 hours later at 10 IU/ml.

[0327] Restimulation of the induction cultures with peptide-pulsed adherent cells: Seven and fourteen days after the primary induction the cells were restimulated with peptide-pulsed adherent cells. The PBMCS were thawed and washed twice with RPMI and DNAse. The cells were resuspended at 5×10⁶ cells/ml and irradiated at ˜4200 rads. The PBMCs were plated at 2×10⁶ in 0.5 ml complete medium per well and incubated for 2 hours at 37° C. The plates were washed twice with RPMI by tapping the plate gently to remove the nonadherent cells and the adherent cells pulsed with 10 μg/ml of peptide in the presence of 3 μg/ml β₂ microglobulin in 0.25 ml RPMI/5% AB per well for 2 hours at 37° C. Peptide solution from each well was aspirated and the wells were washed once with RPMI. Most of the media was aspirated from the induction cultures (CD8+ cells) and brought to 0.5 ml with fresh media. The cells were then transferred to the wells containing the peptide-pulsed adherent cells. Twenty four hours later rhuman IL10 was added at a final concentration of 10 ng/ml and rhuman IL2 was added the next day and again 2-3 days later at 50 IU/ml (Tsai et al., Critical Reviews in Immunology 18(l-2):65-75, 1998). Seven days later the cultures were assayed for CTL activity in a ⁵¹Cr release assay. In some experiments the cultures were assayed for peptide-specific recognition in the in situ IFNγ ELISA at the time of the second restimulation followed by assay of endogenous recognition 7 days later. After expansion, activity was measured in both assays for a side by side comparison.

[0328] Measurement of CTL Lytic Activity by ⁵¹Cr Release.

[0329] Seven days after the second restimulation, cytotoxicity was determined in a standard (5 hr) ⁵¹Cr release assay by assaying individual wells at a single E:T. Peptide-pulsed targets were prepared by incubating the cells with 10 μg/ml peptide overnight at 37° C.

[0330] Adherent target cells were removed from culture flasks with trypsin-EDTA. Target cells were labelled with 200 μCi of ⁵¹Cr sodium chromate (Dupont, Wilmington, Del.) for 1 hour at 37° C. Labelled target cells are resuspended at 10⁶ per ml and diluted 1:10 with K562 cells at a concentration of 3.3×10⁶/ml (an NK-sensitive erythroblastoma cell line used to reduce non-specific lysis). Target cells.(100 μl) and 100 μl of effectors were plated in 96 well round-bottom plates and incubated for 5 hours at 37° C. At that time, 100 μl of supernatant were collected from each well and percent lysis was determined according to the formula: [(cpm of the test sample−cpm of the spontaneous ⁵¹Cr release sample)/(cpm of the maximal ⁵¹Cr release sample−cpm of the spontaneous ⁵¹Cr release sample)]×100. Maximum and spontaneous release were determined by incubating the labelled targets with 1% Trition X-100 and media alone, respectively. A positive culture was defined as one in which the specific lysis (sample-background) was 10% or higher in the case of individual wells and was 15% or more at the 2 highest E:T ratios when expanded cultures were assayed.

[0331] In situ Measurement of Human γIFN Production as an Indicator of Peptide-Specific and Endogenous Recognition

[0332] Immunol 2 plates were coated with mouse anti-human IFNγ monoclonal antibody (4 μg/ml 0.1M NaHCO₃, pH8.2) overnight at 4° C. The plates were washed with Ca²⁺, Mg²⁺-free PBS/0.05% Tween 20 and blocked with PBS/10% FCS for 2 hours, after which the CTLs (100 μl/well) and targets (100 μ/well) were added to each well, leaving empty wells for the standards and blanks (which received media only). The target cells, either peptide-pulsed or endogenous targets, were used at a concentration of 1×10⁶ cells/ml. The plates were incubated for 48 hours at 37° C. with 5% CO₂.

[0333] Recombinant human IFNγ was added to the standard wells starting at 400 pg or 1200 pg/100 μl/well and the plate incubated for 2 hours at 37° C. The plates were washed and 100 μl of biotinylated mouse anti-human IFNγ monoclonal antibody (4 μg/ml in PBS/3% FCS/0.05% Tween 20) were added and incubated for 2 hours at room temperature. After washing again, 100 μl HRP-streptavidin were added and incubated for 1 hour at room temperature. The plates were then washed 6× with wash buffer, 100 μl/well developing solution (TMB 1:1) were added, and the plates allowed to develop for 5-15 minutes. The reaction was stopped with 50 μl/well 1M H₃PO₄ and read at OD450. A culture was considered positive if it measured at least 50 pg of IFNγ/well above background and was twice the background level of expression.

[0334] CTL Expansion. Those cultures that demonstrated specific lytic activity against peptide-pulsed targets and/or tumor targets were expanded over a two week period with anti-CD3. Briefly, 5×10⁴ CD8+ cells were added to a T25 flask containing the following: 1×10⁶ irradiated (4,200 rad) PBMC (autologous or allogeneic) per ml, 2×10⁵ irradiated (8,000 rad) EBV-transformed cells per ml, and OKT3 (anti-CD3) 30 ng per ml in RPMI-1640 containing 10% (v/v) human AB serun, non-essential amino acids, sodium pyruvate, 25 μM 2-mercaptoethanol, L-glutamine and penicillin/streptomycin. rHuman IL2 was added 24 hours later at a final concentration of 200 IU/ml and every 3 days thereafter with fresh media at 50 IU/ml. The cells were split if the cell concentration exceeded 1×10⁶/ml and the cultures were assayed between days 13 and 15 at E:T ratios of 30, 10, 3 and 1:1 in the ⁵¹Cr release assay or at 1×10⁶/ml in the in situ IFNγ assay using the same targets as before the expansion.

[0335] Immunogenicity of A2 Supermotif-Bearing Peptides

[0336] The A2-supermotif cross-reactive binding peptides that were selected for further evaluation were tested in the cellular assay for the ability to induce peptide-specific CTL in normal individuals. In this analysis, a peptide was considered to be an epitope if it induced peptide-specific CTLs in at least 2 donors (unless otherwise noted) and if those CTLs also recognized the endogenously expressed peptide.

[0337] Peptides that were screened in the cellular assay and shown to induce a response in PBMCs from at least 2 normal donors are shown in Table XXVII. CiLs to some of these peptides were also able to recognize endogenously expressed peptide (Table XXVII). Two of these peptide sequences, MAGE3.159 and MAGE3.160, overlap and, while both bind to 5 allele-specific HLA molecules, MAGE3.160 binds with a higher affinity to 4 of the 5 alleles. A IFNγ in situ ELISA of individual CTL cultures induced with MAGE3.159 showed that cells from five wells recognized the peptide-pulsed targets, and 2 of these wells also recognized the appropriate tumor target. Additionally, MAGE3.160 induced a peptide-specific CTL response in 14 of 48 wells and 3 of these wells demonstrated endogenous recognition in the IFNγ assay.

[0338] MAGE3.112, MAGE2.157, and MAGE3.271 have also been identified as epitopes (see, e.g., Kawashima et al., Human Immunol. 59:1-14, 1998; Visseren, Int. J. Cancer 73:125, 1997).

[0339] Evaluation of A *03/A11 Immunogenicity

[0340] HLA-A3 supermotif-bearing cross-reactive binding peptides are also evaluated for immunogenicity using methodology analogous for that used to evaluate the immunogenicity of the HLA-A2 supermotif peptides. Using this procedure, peptides that induce an immune response are identified. Examples of such peptides are shown in Table XXIII.

[0341] Evaluation of B7 Immunogenicity

[0342] Immunogenicity screening of the B7-supertype cross-reactive binding peptides identified in Example 2 are evaluated in a manner analogous to the evaluation of A2-and A3-supermotif-bearing peptides. Using this procedure, peptides that induce an immune response are identified. Examples of such peptides are shown in Table XXIV.

[0343] Evaluation of Immunogenicity of Motif/Supermotif-Bearing Peptides.

[0344] Analogous methodology, as appreciated by one of ordinary skill in the art, is employed to determine immunogenicity of peptides bearing HLA class I motifs and/or supermotifs set out herein. Using such a prodcedure peptides that induce an immune response are identified, e.g., Tables XXV and XXVI.

### Example 4

[0345] Implementation of the Extended Supermotif to Improve the Binding Capacity of Native Epitopes by Creating Analogs

[0346] HLA motifs and supermotifs (comprising primary and/or secondary residues) are useful in the identification and preparation of highly cross-reactive native peptides, as demonstrated herein. Moreover, the definition of HLA motifs and supermotifs also allows one to engineer highly cross-reactive epitopes by identifying residues within a native peptide sequence which can be analogued, or “fixed” to confer upon the peptide certain characteristics, e.g. greater cross-reactivity within the group of HLA molecules that comprise a supertype, and/or greater binding affinity for some or all of those HLA molecules. Examples of analog peptides that exhibit modulated binding affinity are set forth in this example and provided in Tables XXII through XXVII

[0347] Analoging at Primary Anchor Residues

[0348] Peptide engineering strategies were implemented to further increase the cross-reactivity of the epitopes identified above. On the basis of the data disclosed, e.g., in related and co-pending U.S. Ser. No. 09/226,775, the main anchors of A2-supermotif-bearing peptides are altered, for example, to introduce a preferred L, I, V, or M at position 2, and I or V at the C-terminus.

[0349] Peptides that exhibit at least weak A*0201 binding (IC₅₀ of 5000 nM or less), and carrying suboptimal anchor residues at either position 2, the C-terminal position, or both, can be fixed by introducing canonical substitutions (L at position 2 and V at the C-terminus). Those analogued peptides that show at least a three-fold increase in A*0201 binding and bind with an IC₅₀ of 500 nM, or less were then tested for A2 cross-reactive binding along with their wild-type (WT) counterparts. Analogued peptides that bind at least three of the five A2 supertype alleles were then selected for cellular screening analysis.

[0350] Additionally, the selection of analogs for cellular screening analysis was further restricted by the capacity of the WT parent peptide to bind at least weakly, i.e., bind at an IC₅₀ of 5000 nM or less, to three of more A2 supertype alleles. The rationale for this requirement is that the WT peptides must be present endogenously in sufficient quantity to be biologically relevant. Analogued peptides have been shown to have increased immunogenicity and cross-reactivity by T cells specific for the WT epitope (see, e.g. Parkhurst et al., J. Immunol. 157:2539, 1996; and Pogue et al., Proc. Natl. Acad. Sci. USA 92:8166, 1995).

[0351] In the cellular screening of these peptide analogs, it is important to demonstrate that analog-specific CTLs are also able to recognize the wild-type peptide and, when possible, tumor targets that endogenously express the epitope.

[0352] Of the 19 MAGE2/3-derived A*0201 binding peptides, 14 carried suboptimal anchor residues. Analogs of two peptide epitopes were synthesized and tested for binding to HLA-A2 supertype molecules. MAGE3.112 analogs exhibited increased A*0201 binding affinity, but the parent peptide bound all 5 A2 supertype HLA molecules and significant improvement was not achieved. The MAGE3.220 analog, however, did demonstrate a 3-fold increase in A*0201 binding affinity and improved cross-reactive binding (Table XXII).

[0353] In addition, 24 of the 26 weak A*0201 binding peptides also met the criteria for analoguing and can be similarly analyzed for improved binding properties.

[0354] Those MAGE2/3 analogs that show improved binding relative to the wildtype peptide are evaluated in the cellular screening analysis as described in Example 3. Using this methodology, immunogenic analog peptides are identified (Table XXVII).

[0355] Using methodology similar to that used to develop HLA-A2 analogs, analogs of HLA-A3 and HLA-B7 supermotif-bearing epitopes are also generated. For example, peptides binding at least weakly to ⅗ of the A3-supertype molecules can be engineered at primary anchor residues to possess a preferred residue (V, S, M, or A) at position 2. The analog peptides are then tested for the ability to bind A*03 and A*11 (prototype A3 supertype alleles). Those peptides that demonstrate ≦500 nM binding capacity are then tested for A3-supertype cross-reactivity. Examples of HLA-A3 supermotif analog peptides are provided in Table XXIII.

[0356] B7 supermotif-bearing peptides can, for example, be engineered to possess a preferred residue (V, I, L, or F) at the C-terminal primary anchor position (see, e.g. Sidney et al. (J. Immunol. 157:3480-3490, 1996). Analoged peptides are then tested for cross-reactive binding to B7 supertype alleles. Examples of B7-supermotif-bearing analog peptides are provided in Table XXIV.

[0357] Similarly, HLA-A1 and HLA-A24 motif-bearing peptides can be engineered at primary anchor residues to improved binding to the allele-specific HLA molecule or to improve cross-reactive binding. Examples of analoged HLA-A1 and HLA-A24 motif-bearing peptides are provided in Tables XXV and XXVI.

[0358] Analoged peptides that exhibit improved binding and/or or cross-reactivity are evaluated for immunogenicity using methodology similar to that described for the analysis of HLA-A2 supermotif-bearing peptides. Using such a procedure, peptides that induce an immune response are identified.

[0359] Analoguing at Secondary Anchor Residues

[0360] Moreover, HLA supermotifs are of value in engineering highly cross-reactive peptides and/or peptides that bind HLA molecules with increased affinity by identifying particular residues at secondary anchor positions that are associated with such properties. Examples of such analoged peptides are provided in Table XXIV.

[0361] For example, the binding capacity of a B7 supermotif-bearing peptide representing a discreet single amino acid substitution at position 1 can be analyzed. A peptide can, for example, be analogued to substitute L with F at position 1 and subsequently be evaluated for increased binding affinity/and or increased cross-reactivity. This procedure will identify analogued peptides with modulated binding affinity.

[0362] Engineered analogs with sufficiently improved binding capacity or cross-reactivity are tested for immunogenicity as above.

[0363] Other Analoguing Strategies

[0364] Another form of peptide analoguing, unrelated to the anchor positions, involves the substitution of a cysteine with α-amino butyric acid. Due to its chemical nature, cysteine has the propensity to form disulfide bridges and sufficiently alter the peptide structurally so as to reduce binding capacity. Substitution of α-amino butyric acid for cysteine not only alleviates this problem, but has been shown to improve binding and crossbinding capabilities in some instances (see, e.g., the review by Sette et al., In: Persistent Viral Infections, Eds. R. Ahmed and I. Chen, John Wiley & Sons, England, 1999).

[0365] Analoged peptides that exhibit improved binding and/or or cross-reactivity are evaluated for immunogenicity using methodology similar to that described for the analysis of HLA-A2 supermotif-bearing peptides. Using such a procedure, peptides that induce an immune response are identified.

[0366] This Example therefore demonstrates that by the use of even single amino acid substitutions, the binding affinity and/or cross-reactivity of peptide ligands for HLA supertype molecules is modulated.

### Example 5

[0367] Identification of Peptide Epitope Sequences with HLA-DR Binding Motifs

[0368] Peptide epitopes bearing an HLA class II supermotif or motif may also be identified as outlined below using methodology similar to that described in Examples 1-3.

[0369] Selection of HLA-DR-Supermotif-Bearing Epitopes

[0370] To identify HLA class II HTL epitopes, the MAGE2/3 protein sequences were analyzed for the presence of sequences bearing an HLA-DR-motif or supermotif. Specifically, 15-mer sequences were selected comprising a DR-supermotif, further comprising a 9-mer core, and three-residue N- and C-terminal flanking regions (15 amino acids total).

[0371] Protocols for predicting peptide binding to DR molecules have been developed (Southwood et al., J. Immunol. 160:3363-3373, 1998). These protocols, specific for individual DR molecules, allow the scoring, and ranking, of 9-mer core regions. Each protocol not only scores peptide sequences for the presence of DR-supermotif primary anchors (i.e., at position 1 and position 6) within a 9-mer core, but additionally evaluates sequences for the presence of secondary anchors. Using allele specific selection tables (see, e.g., Southwood et al., ibid.), it has been found that these protocols efficiently select peptide sequences with a high probability of binding a particular DR molecule. Additionally, it has been found that performing these protocols in tandem, specifically those for DR1, DR4w4, and DR7, can efficiently select DR cross-reactive peptides.

[0372] The MAGE2/3-derived peptides identified above were tested for their binding capacity for various common HLA-DR molecules. All peptides were initially tested for binding to the DR molecules in the primary panel: DR1, DR4w4, and DR7. Peptides binding at least 2 of these 3 DR molecules with an IC₅₀ value of 1000 nM or less, were then tested for binding to DR5*0101, DRB1*1501, DRB1*1101, DRB1*0802, and DRB1*1302. Peptides were considered to be cross-reactive DR supertype binders if they bound at an IC₅₀ value of 1000 nM or less to at least 5 of the 8 alleles tested.

[0373] Following the strategy outlined above, 97 DR supermotif-bearing sequences were identified within the MAGE2/3 protein sequences. Of those, 23 scored positive in 2 of the 3 combined DR 147 algorithms. These peptides were synthesized and tested for binding to HLA-DRB1*0101, DRB1*0401, DRB1*0701 with 13, 3, and 7 peptides binding ≦1000 nM, respectively. Of the 23 peptides tested for binding to these primary HLA molecules, 7 bound at least 2 of the 3 alleles (Table XXVIII).

[0374] These 7 peptides were then tested for binding to secondary DR supertype alleles: DRB5*0101, DRB1*1501,DRB1*1101, DRB1*0802,and DRB1*1302. Three of the peptides bound at least 5of the8 alleles tested, and occurred in distinct, non-overlapping regions (Table XXIX).

[0375] Selection of DR3 Motif Peptides

[0376] Because HLA-DR3 is an allele that is prevalent in Caucasian, Black, and Hispanic populations, DR3 binding capacity is an important criterion in the selection of HTL epitopes. However, data generated previously indicated that DR3 only rarely cross-reacts with other DR alleles (Sidney et al., J. Immunol. 149:2634-2640, 1992; Geluk et al., J. Immunol. 152:5742-5748, 1994; Southwood et al., J. Immunol. 160:3363-3373, 1998). This is not entirely surprising in that the DR3 peptide-binding motif appears to be distinct from the specificity of most other DR alleles. For maximum efficiency in developing vaccine candidates it would be desirable for DR3 motifs to be clustered in proximity with DR supermotif regions. Thus, peptides shown to be candidates may also be assayed for their DR3 binding capacity. However, in view of the distinct binding specificity of the DR3 motif, peptides binding only to DR3 can also be considered as candidates for inclusion in a vaccine formulation.

[0377] To efficiently identify peptides that bind DR3, the MAGE2/3 protein sequences were analyzed for conserved sequences carrying one of the two DR3 specific binding motifs (Table III) reported by Geluk et al. (J. Immunol. 152:5742-5748, 1994). Twenty-three motif-positive peptides were identified. The corresponding peptides were then synthesized and tested for the ability to bind DR3 with an affinity of ≦1000 nM. Two peptides were identified that met this binding criterion (Table XXX), and thereby qualify as HLA class II high affinity binders.

[0378] The 2 DR3 binding peptides were then tested for binding to the DR supertype alleles (Table XXXI). Both DR3 binding peptides bound DRB1*1302 with an IC₅₀ of 269 nM, but neither was a DR supertype cross-reactive binder. Conversely, the DR supertype cross-reactive binding peptides were also tested for DR3 binding capacity, with no measurable DR3 binding observed.

[0379] In summary, 3 DR supertype cross-reactive binding peptides were identified from the MAGE2/3 protein sequences.

[0380] Similarly to the case of HLA class I motif-bearing peptides, the class II motif-bearing peptides may be analogued to improve affinity or cross-reactivity. For example, aspartic acid at position 4 of the 9-mer core sequence is an optimal residue for DR3 binding, and substitution for that residue may improve DR 3 binding.

### Example 6

[0381] Immunogenicity of HTL Epitopes

[0382] This example determines immunogenic DR supermotif- and DR3 motif-bearing epitopes among those identified using the methodology in Example 5. Immunogenicity of HTL epitopes are evaluated in a manner analogous to the determination of immunogenicity of CTL epitopes by assessing the ability to stimulate HTL responses and/or by using appropriate transgenic mouse models. Immunogenicity is determined by screening for: 1.) in vitro primary induction using normal PBMC or 2.) recall responses from cancer patient PBMCs.

### Example 7

[0383] Calculation of Phenotypic Frequencies of HLA-Supertypes in Various Ethnic Backgrounds to Determine Breadth of Population Coverage

[0384] This example illustrates the assessment of the breadth of population coverage of a vaccine composition comprised of multiple epitopes comprising multiple supermotifs and/or motifs.

[0385] In order to analyze population coverage, gene frequencies of HLA alleles were determined. Gene frequencies for each HLA allele were calculated from antigen or allele frequencies utilizing the binomial distribution formulae gf=1−(SQRT(1−af)) (see, e.g., Sidney et al., Human Immunol. 45:79-93, 1996). To obtain overall phenotypic frequencies, cumulative gene frequencies were calculated, and the cumulative antigen frequencies derived by the use of the inverse formula [af=1−(1−Cgf)²].

[0386] Where frequency data was not available at the level of DNA typing, correspondence to the serologically defined antigen frequencies was assumed. To obtain total potential supertype population coverage no linkage disequilibrium was assumed, and only alleles confirmed to belong to each of the supertypes were included (minimal estimates). Estimates of total potential coverage achieved by inter-loci combinations were made by adding to the A coverage the proportion of the non-A covered population that could be expected to be covered by the B alleles considered (e.g., total=A+B*(1−A)). Confirmed members of the A3-like supertype are A3, A11, A31, A*3301, and A*6801. Although the A3-like supertype may also include A34, A66, and A*7401, these alleles were not included in overall frequency calculations. Likewise, confirmed members of the A2-like supertype family are A*0201, A*0202, A*0203, A*0204, A*0205, A*0206, A*0207, A*6802, and A*6901. Finally, the B7-like supertype-confirmed alleles are: B7, B*3501-03, B51, B*5301, B*5401, B*5501-2, B*5601, B*6701, and B*7801 (potentially also B*1401, B*3504-06, B*4201, and B*5602).

[0387] Population coverage achieved by combining the A2-, A3- and B7-supertypes is approximately 86% in five major ethnic groups (see Table XM). Coverage may be extended by including peptides bearing the A1 and A24 motifs. On average, A1 is present in 12% and A24 in 29% of the population across five different major ethnic groups (Caucasian, North American Black, Chinese, Japanese, and Hispanic). Together, these alleles are represented with an average frequency of 39% in these same ethnic populations. The total coverage across the major ethnicities when A1 and A24 are combined with the coverage of the A2-, A3- and B7-supertype alleles is >95%. An analogous approach can be used to estimate population coverage achieved-with combinations of class II motif-bearing epitopes.

### Example 8

[0388] Recognition of Generation of Endogenous Processed Antigens After Priming

[0389] This example determines that CTL induced by native or analogued peptide epitopes identified and selected as described in Examples 1-6 recognize endogenously synthesized, i.e., native antigens, using a transgenic mouse model.

[0390] Effector cells isolated from transgenic mice that are immunized with peptide epitopes (as described, e.g., in Wentworth et al., Mol. Immunol. 32:603, 1995), for example HLA-A2 supermotif-bearing epitopes, are re-stimulated in vitro using peptide-coated stimulator cells. Six days later, effector cells are assayed for cytotoxicity and the cell lines that contain peptide-specific cytotoxic activity are further re-stimulated. An additional six days later, these cell lines are tested for cytotoxic activity on ⁵¹Cr labeled Jurkat-A2.1/K^{b} target cells in the absence or presence of peptide, and also tested on ⁵¹Cr labeled target cells bearing the endogenously synthesized antigen, i.e. cells that are stably transfected with TAA expression vectors.

[0391] The result will demonstrate that CTL lines obtained from animals primed with peptide epitope recognize endogenously synthesized antigen. The choice of transgenic mouse model to be used for such an analysis depends upon the epitope(s) that is being evaluated. In addition to HLA-A*020₁/K^{b} transgenic mice, several other transgenic mouse models including mice with human A11, which may also be used to evaluate A3 epitopes, and B7 alleles have been characterized and others (e.g., transgenic mice for HLA-A1 and A24) are being developed. HLA-DR1 and HLA-DR3 mouse models have also been developed, which may be used to evaluate HTL epitopes.

### Example 9

[0392] Activity of CTL-HTL Conjugated Epitopes in Transgenic Mice

[0393] This example illustrates the induction of CTLs and HTLs in transgenic mice by use of a tumor associated antigen CTL/HTL peptide conjugate whereby the vaccine composition comprises peptides to be administered to a cancer patient. The peptide composition can comprise multiple CTL and/or HTL epitopes and further, can comprise epitopes selected from multiple-tumor associated antigens. The epitopes are identified using methodology as described in Examples 1-6 This analysis demonstrates the enhanced immunogenicity that can be achieved by inclusion of one or more HTL epitopes in a vaccine composition. Such a peptide composition can comprise an HTL epitope conjugated to a preferred CTL epitope containing, for example, at least one CTL epitope selected from Tables XXVII and XXIII-XXVI, or other analogs of that epitope. The HTL epitope is, for example, selected from Table XI. The peptides may be lipidated, if desired.

[0394] Immunization procedures: Immunization of transgenic mice is performed as described (Alexander et al., J. Immunol. 159:4753-4761, 1997). For example, A2/K^{b} mice, which are transgenic for the human HLA A2.1 allele and are useful for the assessment of the immunogenicity of HLA-A*0201 motif- or HLA-A2 supermotif-bearing epitopes, are primed subcutaneously (base of the tail) with 0.1 ml of peptide conjugate formulated in saline, or DMSO/saline. Seven days after priming, splenocytes obtained from these animals are restimulated with syngenic irradiated LPS-activated lymphoblasts coated with peptide.

[0395] The target cells for peptide-specific cytotoxicity assays are Jurkat cells transfected with the HLA-A2.1/K^{b} chimeric gene (e.g., Vitiello et al., J. Exp. Med. 173:1007, 1991).

[0396] In vitro CTL activation: One week after priming, spleen cells (30×10⁶ cells/flask) are co-cultured at 37° C. with syngeneic, irradiated (3000 rads), peptide coated lymphoblasts (10×10⁶ cells/flask) in 10 ml of culture medium/T25 flask. After six days, effector cells are harvested and assayed for cytotoxic activity.

[0397] Assay for cytotoxic activity: Target cells (1.0 to 1.5×10⁶) are incubated at 37° C. in the presence of 200 μl of ⁵¹Cr. After 60 minutes, cells are washed three times and resuspended in medium. Peptide is added where required at a concentration of 1 μg/ml. For the assay, 10^{4 51}Cr-labeled target cells are added to different concentrations of effector cells (final volume of 200 μl) in U-bottom 96-well plates. After a 6 hour incubation period at 37° C., a 0.1 ml aliquot of supernatant is removed from each well and radioactivity is determined in a Micromedic automatic gamma counter. The percent specific lysis is determined by the formula: percent specific release=100×(experimental release−spontaneous release)/(maximum release−spontaneous release). To facilitate comparison between separate CTL assays run under the same conditions, % ⁵¹Cr release data is expressed as lytic units/10⁶ cells. One lytic unit is arbitrarily defined as the number of effector cells required to achieve 30% lysis of 10,000 target cells in a 6 hour ⁵¹Cr release assay. To obtain specific lytic units/10⁶, the lytic units/10⁶ obtained in the absence of peptide is subtracted from the lytic units/10⁶ obtained in the presence of peptide. For example, if 30% ⁵¹Cr release is obtained at the effector (E): target (T) ratio of 50:1 (i.e., 5×10⁵ effector cells for 10,000 targets) in the absence of peptide and 5:1 (i.e., 5×10⁴ effector cells for 10,000 targets) in the presence of peptide, the specific lytic units would be: [(1/50,000)−(1/500,000)]×10⁶=18 LU.

[0398] The results are analyzed to assess the magnitude of the CTL responses of animals injected with the immunogenic CTL/HTL conjugate vaccine preparation. The magnitude and frequency of response can also be compared to the CTL response achieved using the CTL epitopes by themselves. Analyses similar to this may be performed to evaluate the immunogenicity of peptide conjugates containing multiple CTL epitopes and/or multiple HTL epitopes. In accordance with these procedures it is found that a CTL response is induced, and concomitantly that an HTL response is induced upon administration of such compositions.

### Example 10

[0399] Selection of CTL and HTL Epitopes for Inclusion in a Cancer Vaccine.

[0400] This example illustrates the procedure for the selection of peptide epitopes for vaccine compositions of the invention. The peptides in the composition can be in the form of a nucleic acid sequence, either single or one or more sequences (i.e., minigene) that encodes peptide(s), or may be single and/or polyepitopic peptides.

[0401] The following principles are utilized when selecting an array of epitopes for inclusion in a vaccine composition. Each of the following principles is balanced in order to make the selection.

[0402] Epitopes are selected which, upon administration, mimic immune responses that have been observed to be correlated with tumor clearance. For example, a vaccine can include 3-4 epitopes that come from at least one TAA. Epitopes from one TAA can be used in combination with epitopes from one or more additional TAAs to produce a vaccine that targets tumors with varying expression patterns of frequently-expressed TAAs as described, e.g., in Example 15.

[0403] Epitopes are preferably selected that have a binding affinity (IC50) of 500 nM or less, often 200 nM or less, for an HLA class I molecule, or for a class II molecule, 1000 nM or less.

[0404] Sufficient supermotif bearing peptides, or a sufficient array of allele-specific motif bearing peptides, are selected to give broad population coverage. For example, epitopes are selected to provide at least 80% population coverage. A Monte Carlo analysis, a statistical evaluation known in the art, can be employed to assess breadth, or redundancy, of population coverage.

[0405] When selecting epitopes from cancer-related antigens it is often preferred to select analogs because the patient may have developed tolerance to the native epitope.

[0406] When creating a polyepitopic composition, e.g. a minigene, it is typically desirable to generate the smallest peptide possible that encompasses the epitopes of interest, although spacers or other flanking sequences can also be incorporated. The principles employed are often similar as those employed when selecting a peptide comprising nested epitopes. Additionally, however, upon determination of the nucleic acid sequence to be provided as a minigene, the peptide sequence encoded thereby is analyzed to determine whether any “junctional epitopes” have been created. A junctional epitope is a potential HLA binding, epitope, as predicted, e.g., by motif analysis. Junctional epitopes are generally to be avoided because the recipient may bind to an HLA molecule and generate an immune response to that epitope, which is not present in a native protein sequence.

[0407] CTL epitopes for inclusion in vaccine compositions are, for example, selected from those listed in Tables XXVII and XXIII-XXVI. Examples of HTL epitopes that can be included in vaccine compositions are provided in Table XXXI. A vaccine composition comprised of selected peptides, when administered, is safe, efficacious, and elicits an immune response that results in tumor cell killing and reduction of tumor size or mass.

### Example 11

[0408] Construction of Minigene Multi-Epitope DNA Plasmids

[0409] This example provides general guidance for the construction of a minigene expression plasmid. Minigene plasmids may, of course, contain various configurations of CTL and/or HTL epitopes or epitope analogs as described herein. Expression plasmids have been constructed and evaluated as described, for example, in co-pending U.S. Ser. No. 09/311,784 filed May 13, 1999.

[0410] A minigene expression plasmid may include multiple CTL and HTL peptide epitopes. In the present example, HLA-A2,-A3,-B7 supermotif-bearing peptide epitopes and HLA-A1 and -A24 motif-bearing peptide epitopes are used in conjunction with DR supermotif-bearing epitopes and/or DR3 epitopes. Preferred epitopes are identified, for example, in Tables XXIII-XXVII and X)XI. HLA class I supermotif or motif-bearing peptide epitopes derived from multiple TAAs are selected such that multiple supermotifs/motifs are represented to ensure broad population coverage. Similarly, HLA class II epitopes are selected from multiple tumor antigens to provide broad population coverage, i.e. both HLA DR-1-4-7 supermotif-bearing epitopes and HLA DR-3 motif-bearing epitopes are selected for inclusion in the minigene construct. The selected CTL and HTL epitopes are then incorporated into a minigene for expression in an expression vector.

[0411] This example illustrates the methods to be used for construction of such a minigene-bearing expression plasmid. Other expression vectors that may be used for minigene compositions are available and known to those of skill in the art.

[0412] The minigene DNA plasmid contains a consensus Kozak sequence and a consensus murine kappa Ig-light chain signal sequence followed by CTL and/or HTL epitopes selected in accordance with principles disclosed herein. The sequence encodes an open reading frame fused to the Myc and His antibody epitope tag coded for by the pcDNA 3.1 Myc-His vector.

[0413] Overlapping oligonucleotides, for example eight oligonucleotides, averaging approximately 70 nucleotides in length with 15 nucleotide overlaps, are synthesized and PLC-purified. The oligonucleotides encode the selected peptide epitopes as well as appropriate linker nucleotides, Kozak sequence, and signal sequence. The final multiepitope minigene is assembled by extending the overlapping oligonucleotides in three sets of reactions using PCR. A Perkin/Elmer 9600 PCR machine is used and a total of 30 cycles are performed using the following conditions: 95° C. for 15 sec, annealing temperature (5° below the lowest calculated Tm of each primer pair) for 30 sec, and 72° C. for 1 min.

[0414] For the first PCR reaction, 5 μg of each of two oligonucleotides are annealed and extended: Oligonucleotides 1+2, 3+4, 5+6, and 7+8 are combined in 100 μl reactions containing Pfu polymerase buffer (1×=10 mM KCL, 10 mM (NH₄)₂SO₄, 20 mM Tris-chloride, pH 8.75, 2 mM MgSO₄, 0.1% Triton X-100, 100 μg/ml BSA), 0.25 mM each dNTP, and 2.5 U of Pfu polymerase. The full-length dimer products are gel-purified, and two reactions containing the product of 1+2 and 3+4, and the product of 5+6 and 7+8 are mixed, annealed, and extended for 10 cycles. Half of the two reactions are then mixed, and 5 cycles of annealing and extension carried out before flanking primers are added to amplify the full length product for 25 additional cycles. The full-length product is gel-purified and cloned into pCR-blunt (Invitrogen) and individual clones are screened by sequencing.

### Example 12

[0415] The Plasmid Construct and the Degree to which it Induces Immunogenicity.

[0416] The degree to which the plasmid construct prepared using the methodology outlined in Example 11 is able to induce immunogenicity is evaluated through in vivo injections into mice and subsequent in vitro assessment of CTL and HTL activity, which are analysed using cytotoxicity and proliferation assays, respectively, as detailed e.g., in U.S. Ser. No. 09/311,784 filed May 13, 1999 and Alexander et al., Immunity 1:751-761, 1994.

[0417] Alternatively, plasmid constructs can be evaluated in vitro by testing for epitope presentation by APC following transduction or transfection of the APC with an epitope-expressing nucleic acid construct. Such a study determines “antigenicity” and allows the use of human APC. The assay determines the ability of the epitope to be presented by the APC in a context that is recognized by a T cell by quantifying the density of epitope-HLA class I complexes on the cell surface. Quantitation can be performed by directly measuring the amount of peptide eluted from the APC (see, e.g., Sijts et al., J. Immunol. 156:683-692, 1996; Demotz et al., Nature 342:682-684, 1989); or the number of peptide-HLA class I complexes can be estimated by measuring the amount of lysis or lymphokine release induced by infected or transfected target cells, and then determining the concentration of peptide necessary to obtained equivalent levels of lysis or lymphokine release (see, e.g., Kageyama et al., J. Immunol. 154:567-576, 1995).

[0418] To assess the capacity of the minigene construct (e.g., a pMin minigene construct generated as described in U.S. Ser. No. 09/311,784) to induce CTLs in vivo, HLA-A11/K^{b} transgenic mice, for example, are immunized intramuscularly with 100 μg of naked cDNA. As a means of comparing the level of CTLs induced by cDNA immunization, a control group of animals is also immunized with an actual peptide composition that comprises multiple epitopes synthesized as a single polypeptide as they would be encoded by the minigene.

[0419] Splenocytes from immunized animals are stimulated twice with each of the respective compositions (peptide epitopes encoded in the minigene or the polyepitopic peptide), then assayed for peptide-specific cytotoxic activity in a ⁵¹Cr release assay. The results indicate the magnitude of the CTL response directed against the A3-restricted epitope, thus indicating the in vivo immunogenicity of the minigene vaccine and polyepitopic vaccine. It is, therefore, found that the minigene elicits immune responses directed toward the HLA-A3 supermotif peptide epitopes as does the polyepitopic peptide vaccine. A similar analysis is also performed using other HLA-A2 and HLA-B7 transgenic mouse models to assess CTL induction by HLA-A2 and HLA-B7 motif or supermotif epitopes.

[0420] To assess the capacity of a class n epitope encoding minigene to induce HTLs in vivo, I-A^{b} restricted mice, for example, are immunized intramuscularly with 100 μg of plasmid DNA. As a means of comparing the level of HTLs induced by DNA immunization, a group of control animals is also immunized with an actual peptide composition emulsified in complete Freund's adjuvant. CD4+ T cells, i.e. HTLs, are purified from splenocytes of immunized animals and stimulated with each of the respective compositions (peptides encoded in the minigene). The HTL response is measured using a ³H-thymidine incorporation proliferation assay, (see, e.g., Alexander et al. Immunity 1:751-761, 1994). The results indicate the magnitude of the HTL response, thus demonstrating the in vivo immunogenicity of the minigene.

[0421] DNA minigenes, constructed as described in Example 11, may also be evaluated as a vaccine in combination with a boosting agent using a prime boost protocol. The boosting agent may consist of recombinant protein (e.g., Barnett et al., Aids Res. and Human Retroviruses 14, Supplement 3:S299-S309, 1998) or recombinant vaccinia, for example, expressing a minigene or DNA encoding the complete protein of interest (see, e.g., Hanke et al., Vaccine 16:439-445, 1998; Sedegah et al., Proc. Natl. Acad. Sci USA 95:7648-53, 1998; Hanke and McMichael, Immunol. Letters 66:177-181, 1999; and Robinson et al., Nature Med. 5:526-34, 1999).

[0422] For example, the efficacy of the DNA minigene may be evaluated in transgenic mice. In this example, A2.₁/K^{b} transgenic mice are immunized IM with 100 μg of the DNA minigene encoding the immunogenic peptides. After an incubation period (ranging from 3-9 weeks), the mice are boosted IP with 10⁷ pfu/mouse of a recombinant vaccinia virus expressing the same sequence encoded by the DNA minigene. Control mice are immunized with 100 μg of DNA or recombinant vaccinia without the minigene sequence, or with DNA encoding the minigene, but without the vaccinia boost. After an additional incubation period of two weeks, splenocytes from the mice are immediately assayed for peptide-specific activity in an ELISPOT assay. Additionally, splenocytes are stimulated in vitro with the A2-restricted peptide epitopes encoded in the minigene and recombinant vaccinia, then assayed for peptide-specific activity in an IFN-γ ELISA. It is found that the minigene utilized in a prime-boost mode elicits greater immune responses toward the HLA-A2 supermotif peptides than with DNA alone. Such an analysis is also performed using other HLA-A11 and HLA-B7 transgenic mouse models to assess CTL induction by HLA-A3 and HLA-B7 motif or supermotif epitopes.

### Example 13

[0423] Peptide Composition for Prophylactic Uses

[0424] Vaccine compositions of the present invention are used to prevent cancer in persons who are at risk for developing a tumor. For example, a polyepitopic peptide epitope composition (or a nucleic acid comprising the same) containing multiple CTL and HTL epitopes such as those selected in Examples 9 and/or 10, which are also selected to target greater than 80% of the population, is administered to an individual at risk for a cancer, e.g., melanoma. The composition is provided as a single polypeptide that encompasses multiple epitopes. The vaccine is administered in an aqueous carrier comprised of Freunds Incomplete Adjuvant. The dose of peptide for the initial immunization is from about 1 to about 50,000 μg, generally 100-5,000 μg, for a 70 kg patient. The initial administration of vaccine is followed by booster dosages at 4 weeks followed by evaluation of the magnitude of the immune response in the patient, by techniques that determine the presence of epitope-specific CTL populations in a PBMC sample. Additional booster doses are administered as required. The composition is found to be both safe and efficacious as a prophylaxis against cancer.

[0425] Alternatively, the polyepitopic peptide composition can be administered as a nucleic acid in accordance with methodologies known in the art and disclosed herein.

### Example 14

[0426] Polyepitopic Vaccine Compositions Derived from Native TAA Sequences

[0427] A native TAA polyprotein sequence is screened, preferably using computer algorithms defined for each class I and/or class I supermotif or motif, to identify “relatively short” regions of the polyprotein that comprise multiple epitopes and is preferably less in length than an entire native antigen. This relatively short sequence that contains multiple distinct, even overlapping, epitopes is selected and used to generate a minigene construct. The construct is engineered to express the peptide, which corresponds to the native protein sequence. The “relatively short” peptide is generally less than 1,000, 500, or 250 amino acids in length, often less than 100 amino acids in length, preferably less than 75 amino acids in length, and more preferably less than 50 amino acids in length. The protein sequence of the vaccine composition is selected because it has maximal number of epitopes contained within the sequence, i.e., it has a high concentration of epitopes. As noted herein, epitope motifs may be nested or overlapping (i.e., frame shifted relative to one another). For example, with frame shifted overlapping epitopes, two 9-mer epitopes and one 10-mer epitope can be present in a 10 amino acid peptide. Such a vaccine composition is administered for therapeutic or prophylactic purposes.

[0428] The vaccine composition will preferably include, for example, three CTL epitopes and at least one HTL epitope from TAAs. This polyepitopic native sequence is administered either as a peptide or as a nucleic acid sequence which encodes the peptide. Alternatively, an analog can be made of this native sequence, whereby one or more of the epitopes comprise substitutions that alter the cross-reactivity and/or binding affinity properties of the polyepitopic peptide.

[0429] The embodiment of this example provides for the possibility that an as yet undiscovered aspect of immune system processing will apply to the native nested sequence and thereby facilitate the production of therapeutic or prophylactic immune response-inducing vaccine compositions. Additionally such an embodiment provides for the possibility of motif-bearing epitopes for an HLA makeup that is presently unknown. Furthermore, this embodiment (absent analogs) directs the immune response to multiple peptide sequences that are actually present in native TAAs thus avoiding the need to evaluate any junctional epitopes. Lastly, the embodiment provides an economy of scale when producing nucleic acid vaccine compositions.

[0430] Related to this embodiment, computer programs can be derived in accordance with principles in the art, which identify in a target sequence, the greatest number of epitopes per sequence length.

### Example 15

[0431] Polyepitopic Vaccine Compositions Directed to Multiple Tumors

[0432] The MAGE2/3 peptide epitopes of the present invention are used in conjunction with peptide epitopes from other target tumor antigens to create a vaccine composition that is useful for the treatment of various types of tumors. For example, a set of TAA epitopes can be selected that allows the targeting of most common epithelial tumors (see, e.g., Kawashima et al., Hum. Immunol. 59:1-14, 1998). Such a composition includes epitopes from CEA, HER-2/neu, and MAGE2/3, all of which are expressed to appreciable degrees (20-60%) in frequently found tumors such as lung, breast, and gastrointestinal tumors.

[0433] The composition can be provided as a single polypeptide that incorporates the multiple epitopes from the various TAAs, or can be administered as a composition comprising one or more discrete epitopes. Alternatively, the vaccine can be administered as a minigene construct or as dendritic cells which have been loaded with the peptide epitopes in vitro.

[0434] Targeting multiple tumor antigens is also important to provide coverage of a large fraction of tumors of any particular type. A single TAA is rarely expressed in the majority of tumors of a given type. For example, approximately 50% of breast tumors express CEA, 20% express MAGE3, and 30% express HER-2/neu. Thus, the use of a single antigen for immunotherapy would offer only limited patient coverage. The combination of the three TAAs, however, would address approximately 70% of breast tumors. A vaccine composition comprising epitopes from multiple tumor antigens also reduces the potential for escape mutants due to loss of expression of an individual tumor antigen.

### Example 16

[0435] Use of Peptides to Evaluate an Immune Response

[0436] Peptides of the invention may be used to analyze an immune response for the presence of specific CTL or HTL populations directed to a TAA. Such an analysis may be performed using multimeric complexes as described, e.g., by Ogg et al., Science 279:2103-2106, 1998 and Greten et al., Proc. Natl. Acad Sci. USA 95:7568-7573, 1998. In the following example, peptides in accordance with the invention are used as a reagent for diagnostic or prognostic purposes, not as an immunogen.

[0437] In this example, highly sensitive human leukocyte antigen tetrameric complexes (“tetramers”) are used for a cross-sectional analysis of, for example, tumor-associated antigen HLA-A*0201-specific CTL frequencies from HLA A*0201-positive individuals at different stages of disease or following immunization using a TAA peptide containing an A*0201 motif. Tetrameric complexes are synthesized as described (Musey et al., N. Engl. J. Med. 337:1267, 1997). Briefly, purified HLA heavy chain (A*0201 in this example) and β2-microglobulin are synthesized by means of a procaryotic expression system. The heavy chain is modified by deletion of the transmembrane-cytosolic tail and COOH-terminal addition of a sequence containing a BirA enzymatic biotinylation site. The heavy chain, β2-microglobulin, and peptide are refolded by dilution. The 45-kD refolded product is isolated by fast protein liquid chromatography and then biotinylated by BirA in the presence of biotin (Sigma, St. Louis, Mo.), adenosine 5′triphosphate and magnesium. Streptavidin-phycoerythrin conjugate is added in a 1:4 molar ratio, and the tetrameric product is concentrated to 1 mg/ml. The resulting product is referred to as tetramer-phycoerythrin.

[0438] For the analysis of patient blood samples, approximately one million PBMCs are centrifuged at 300 g for 5 minutes and resuspended in 50 μill of cold phosphate-buffered saline. Tri-color analysis is performed with the tetramer-phycoerythrin, along with anti-CD8-Tricolor, and anti-CD38. The PBMCs are incubated with tetramer and antibodies on ice for 30 to 60 min and then washed twice before formaldehyde fixation. Gates are applied to contain >99.98% of control samples. Controls for the tetramers include both A*0201-negative individuals and A*0201-positive uninfected donors. The percentage of cells stained with the tetramer is then determined by flow cytometry. The results indicate the number of cells in the PBMC sample that contain epitope-restricted CTLs, thereby readily indicating the extent of immune response to the TAA epitope, and thus the stage of tumor progression or exposure to a vaccine that elicits a protective or therapeutic response.

### Example 17

[0439] Use of Peptide Epitopes to Evaluate Recall Responses

[0440] The peptide epitopes of the invention are used as reagents to evaluate T cell responses, such as acute or recall responses, in patients. Such an analysis may be performed on patients who are in remission, have a tumor, or who have been vaccinated with a TAA vaccine.

[0441] For example, the class I restricted CTL response of persons who have been vaccinated may be analyzed. The vaccine may be any TAA vaccine. PBMC are collected from vaccinated individuals and HLA typed. Appropriate peptide epitopes of the invention that, optimally, bear supermotifs to provide cross-reactivity with multiple HLA supertype family members, are then used for analysis of samples derived from individuals who bear that HLA type.

[0442] PBMC from vaccinated individuals are separated on Ficoll-Histopaque density gradients (Sigma Chemical Co., St. Louis, Mo.), washed three times in HBSS (GIBCO Laboratories), resuspended in RPMI-1.640 (GIBCO Laboratories) supplemented with L-glutamine (2mM), penicillin (50U/ml), streptomycin (50 μg/ml), and Hepes (10 mM) containing 10% heat-inactivated human AB serum (complete RPMI) and plated using microculture formats. A synthetic peptide comprising an epitope of the invention is added at 10 μg/ml to each well and HBV core 128-140 epitope is added at 1 μg/ml to each well as a source of T cell help during the first week of stimulation.

[0443] In the microculture format, 4×10⁵ PBMC are stimulated with peptide in 8 replicate cultures in 96-well round bottom plate in 100 μl/well of complete RPMI. On days 3 and 10, 100 μl of complete RPMI and 20U/ml final concentration of rIL-2 are added to each well. On day 7 the cultures are transferred into a 96-well flat-bottom plate and restimulated with peptide, rIL-2 and 10⁵ irradiated (3,000 rad) autologous feeder cells. The cultures are tested for cytotoxic activity on day 14. A positive CTL response requires two or more of the eight replicate cultures to display greater than 10% specific ⁵¹Cr release, based on comparison with uninfected control subjects as previously described (Rehermann, et al., Nature Med. 2:1104,1108, 1996; Rehermann et al., J. Clin. Invest. 97:1655-1665, 1996; and Rehermann et al. J. Clin. Invest. 98:1432-1440, 1996).

[0444] Target cell lines are autologous and allogeneic EBV-transformed B-LCL that are either purchased from the American Society for Histocompatibility and Immunogenetics (ASHI, Boston, Mass.) or established from the pool of patients as described (Guilhot, et al. J. Virol. 66:2670-2678, 1992).

[0445] Cytotoxicity assays are performed in the following manner. Target cells consist of either allogeneic HLA-matched or autologous EBV-transformed B lymphoblastoid cell line that are incubated overnight with the synthetic peptide epitope of the invention at 10 μM, and labeled with 100 μCi of ⁵¹Cr (Amersham Corp., Arlington Heights, Ill.) for 1 hour after which they are washed four times with HBSS.

[0446] Cytolytic activity is determined in a standard 4 hour, split-well ⁵¹Cr release assay using U-bottomed 96 well plates containing 3,000 targets/well. Stimulated PBMC are tested at effector/target (E/T) ratios of 20-50:1 on day 14. Percent cytotoxicity is determined from the formula: 100×[(experimental release−spontaneous release)/maximum release−spontaneous release)]. Maximum release is determined by lysis of targets by detergent (2% Triton X-100; Sigma Chemical Co., St. Louis, Mo.). Spontaneous release is <25% of maximum release for all experiments.

[0447] The results of such an analysis indicate the extent to which HLA-restricted CTL populations have been stimulated by previous exposure to the TAA or TAA vaccine.

[0448] The class II restricted HTL responses may also be analyzed. Purified PBMC are cultured in a 96-well flat bottom plate at a density of 1.5×10⁵ cells/well and are stimulated with 10 μg/ml synthetic peptide, whole antigen, or PHA. Cells are routinely plated in replicates of 4-6 wells for each condition. After seven days of culture, the medium is removed and replaced with fresh medium containing 10U/ml IL-2. Two days later, 1 μCi ³H-thymidine is added to each well and incubation is continued for an additional 18 hours. Cellular DNA is then harvested on glass fiber mats and analyzed for ³H-thymidine incorporation. Antigen-specific T cell proliferation is calculated as the ratio of ³H-thymidine incorporation in the presence of antigen divided by the ³H-thymidine incorporation in the absence of antigen.

### Example 18

[0449] Induction of Specific CTL Response in Humans

[0450] A human clinical trial for an immunogenic composition comprising CTL and HTL epitopes of the invention is set up as an IND Phase I, dose escalation study. Such a trial is designed, for example, as follows:

[0451] A total of about 27 subjects are enrolled and divided into 3 groups:

[0452] Group I: 3 subjects are injected with placebo and 6 subjects are injected with 5 μg of peptide composition;

[0453] Group II: 3 subjects are injected with placebo and 6 subjects are injected with 50 μg peptide composition;

[0454] Group II: 3 subjects are injected with placebo and 6 subjects are injected with 500 μg of peptide composition.

[0455] After 4 weeks following the first injection, all subjects receive a booster inoculation at the same dosage. Additional booster inoculations can be administered on the same schedule.

[0456] The endpoints measured in this study relate to the safety and tolerability of the peptide composition as well as its immunogenicity. Cellular immune responses to the peptide composition are an index of the intrinsic activity of the peptide composition, and can therefore be viewed as a measure of biological efficacy. The following summarize the clinical and laboratory data that relate to safety and efficacy endpoints.

[0457] Safety: The incidence of adverse events is monitored in the placebo and drug treatment group and assessed in terms of degree and reversibility.

[0458] Evaluation of Vaccine Efficacy: For evaluation of vaccine efficacy, subjects are bled before and after injection. Peripheral blood mononuclear cells are isolated from fresh heparinized blood by Ficoll-Hypaque density gradient centrifugation, aliquoted in freezing media and stored frozen. Samples are assayed for CTL and HTL activity.

[0459] The vaccine is found to be both safe and efficacious.

### Example 19

[0460] Therapeutic use in Cancer Patients

[0461] Evaluation of vaccine compositions are performed to validate the efficacy of the CTL-HTL peptide compositions in cancer patients. The main objectives of the trials are to determine an effective dose and regimen for inducing CTLs in cancer patients, to establish the safety of inducing a CTL and HTL response in these patients, and to see to what extent activation of CTLs improves the clinical picture of cancer patients, as manifested by a reduction in tumor cell numbers. Such a study is designed, for example, as follows:

[0462] The studies are performed in multiple centers. The trial design is an open-label, uncontrolled, dose escalation protocol wherein the peptide composition is administered as a single dose followed six weeks later by a single booster shot of the same dose. The dosages are 50, 500 and 5,000 micrograms per injection. Drug-associated adverse effects (severity and reversibility) are recorded.

[0463] There are three patient groupings. The first group is injected with 50 micrograms of the peptide composition and the second and third groups with 500 and 5,000 micrograms of peptide composition, respectively. The patients within each group range in age from 21-65, include both males and females (unless the tumor is sex-specific, e.g., breast or prostate cancer), and represent diverse ethnic backgrounds.

### Example 20

[0464] Induction of CTL Responses using a Prime Boost Protocol

[0465] A prime boost protocol similar in its underlying principle to that used to evaluate the efficacy of a DNA vaccine in transgenic mice, which was described in Example 12, may also be used for the administration of the vaccine to humans. Such a vaccine regimen may include an initial administration of, for example, naked DNA followed by a boost using recombinant virus encoding the vaccine, or recombinant protein/polypeptide or a peptide mixture administered in an adjuvant.

[0466] For example, the initial immunization may be performed using an expression vector, such as that constructed in Example 11, in the form of naked nucleic acid administered IM (or SC or ID) in the amounts of 0.5-5 mg at multiple sites. The nucleic acid (0.1 to 1000 μg) can also be administered using a gene gun. Following an incubation period of 3-4 weeks, a booster dose is then administered. The booster can be recombinant fowlpox virus administered at a dose of 5-10⁷ to 5×10⁹ pfu. An alternative recombinant virus, such as an MVA, canarypox, adenovirus, or adeno-associated virus, can also be used for the booster, or the polyepitopic protein or a mixture of the peptides can be administered. For evaluation of vaccine efficacy, patient blood samples will be obtained before immunization as well as at intervals following administration of the initial vaccine and booster doses of the vaccine. Peripheral blood mononuclear cells are isolated from fresh heparinized blood by Ficoll-Hypaque density gradient centrifugation, aliquoted in freezing media and stored frozen. Samples are assayed for CTL and HTL activity.

[0467] Analysis of the results will indicate that a magnitude of response sufficient to achieve protective immunity against cancer is generated.

### Example 21

[0468] Administration of Vaccine Compositions using Dendritic Cells

[0469] Vaccines comprising peptide epitopes of the invention may be administered using antigen-presenting cells (APCs), or “professional” APCs such as dendritic cells (DC). In this example, the peptide-pulsed DC are administered to a patient to stimulate a CTL response in vivo. In this method, dendritic cells are isolated, expanded, and pulsed with a vaccine comprising peptide CTL and HTL epitopes of the invention. The dendritic cells are infused back into the patient to elicit CTL and HTL responses in vivo. The induced CTL and HTL then destroy (CTL) or facilitate destruction (HTL) of the specific target tumor cells that bear the proteins from which the epitopes in the vaccine are derived.

[0470] For example, a cocktail of epitope-bearing peptides is administered ex vivo to PBMC, or isolated DC therefrom, from the patient's blood. A pharmaceutical to facilitate harvesting of DC can be used, such as Progenipoietin™ (Monsanto, St. Louis, Mo.) or GM-CSF/IL-4. After pulsing the DC with peptides and prior to reinfusion into patients, the DC are washed to remove unbound peptides.

[0471] As appreciated clinically, and readily determined by one of skill based on clinical outcomes, the number of dendritic cells reinfused into the patient can vary (see, e.g., Nature Med. 4:328, 1998; Nature Med. 2:52, 1996 and Prostate 32:272, 1997). Although 2-50×10⁶ dendritic cells per patient are typically administered, larger number of dendritic cells, such as 10⁷ or 10⁸ can also be provided. Such cell populations typically contain between 50-90% dendritic cells.

[0472] In some embodiments, peptide-loaded PBMC are injected into patients without purification of the DC. For example, PBMC containing DC generated after treatment with an agent such as Progenipoietin™ are injected into patients without purification of the DC. The total number of PBMC that are administered often ranges from 10⁸ to 10^{10.} Generally, the cell doses injected into patients is based on the percentage of DC in the blood of each patient, as determined, for example, by immunofluorescent analysis with specific anti-DC antibodies. Thus, for example, if Progenipoietin™mobilizes 2% DC in the peripheral blood of a given patient, and that patient is to receive 5×10⁶ DC, then the patient will be injected with a total of 2.5×10⁸ peptide-loaded PBMC. The percent DC mobilized by an agent such as Progenipoietin™ is typically estimated to be between 2-10%, but can vary as appreciated by one of skill in the art.

[0473] Ex Vivo Activation of CTL/HTL Responses

[0474] Alternatively, ex vivo CTL or HTL responses to a particular tumor-associated antigen can be induced by incubating in tissue culture the patient's, or genetically compatible, CTL or HTL precursor cells together with a source of antigen-presenting cells (APC), such as dendritic cells, and the appropriate immunogenic peptides. After an appropriate incubation time (typically about 7-28 days), in which the precursor cells are activated and expanded into effector cells, the cells are infused back into the patient, where they will destroy (CTL) or facilitate destruction (HTL) of their specific target cells, i.e., tumor cells.

### Example 22

[0475] Alternative Method of Identifying Motif-Bearing Peptides

[0476] Another way of identifying motif-bearing peptides is to elute them from cells bearing defined MHC molecules. For example, EBV transformed B cell lines used for tissue typing, have been extensively characterized to determine which HLA molecules they express. In certain cases these cells express only a single type of HLA molecule. These cells can then be infected with a pathogenic organism or transfected with nucleic acids that express the tumor antigen of interest. Thereafter, peptides produced by endogenous antigen processing of peptides produced consequent to infection (or as a result of transfection) will bind to HLA molecules within the cell and be transported and displayed on the cell surface.

[0477] The peptides are then eluted from the HLA molecules by exposure to mild acid conditions and their amino acid sequence determined, e.g., by mass spectral analysis (e.g., Kubo et al., J. Immunol. 152:3913, 1994). Because, as disclosed herein, the majority of peptides that bind a particular HLA molecule are motif-bearing, this is an alternative modality for obtaining the motif-bearing peptides correlated with the particular HLA molecule expressed on the cell.

[0478] Alternatively, cell lines that do not express any endogenous HLA molecules can be transfected with an expression construct encoding a single HLA allele. These cells may then be used as described, i.e., they may be infected with a pathogenic organism or transfected with nucleic acid encoding an antigen of interest to isolate peptides corresponding to the pathogen or antigen of interest that have been presented on the cell surface. Peptides obtained from such an analysis will bear motif(s) that correspond to binding to the single HLA allele that is expressed in the cell.

[0479] As appreciated by one in the art, one can perform a similar analysis on a cell bearing more than one HLA allele and subsequently determine peptides specific for each HLA allele expressed. Moreover, one of skill would also recognize that means other than infection or transfection, such as loading with a protein antigen, can be used to provide a source of antigen to the cell.

[0480] The above examples are provided to illustrate the invention but not to limit its scope. For example, the human terminology for the Major Histocompatibility Complex, namely HLA, is used throughout this document. It is to be appreciated that these principles can be extended to other species as well. Thus, other variants of the invention will be readily apparent to one of ordinary skill in the art and are encompassed by the appended claims. All publications, patents, and patent application cited herein are hereby incorporated by reference for all purposes.

TABLE I

| | | | POSITION |
|---|---|---|---|
| | POSITION | POSITION | C Terminus (Primary |
| | 2 (Primary Anchor) | 3 (Primary Anchor) | Anchor) |
| SUPERMOTIFS | | | |
| A1 | T, I, L, V, M, S | | F, W, Y |
| A2 | L, I, V, M, A, T, Q | | I, V, M, A, T, L |
| A3 | V, S, M, A, T, L, I | | R, K |
| A24 | Y, F, W, I, V, L, M, T | | F, I, Y, W, L, M |
| B7 | P | | V, I, L, F, M, W, Y, A |
| B27 | R, H, K | | F, Y, L, W, M, I, V, A |
| B44 | E, D | | F, W, L, I, M, V, A |
| B58 | A, T, S | | F, W, Y, L, I, V, M, A |
| B62 | Q, L, I, V, M, P | | F, W, Y, M, I, V, L, A |
| MOTIFS | | | |
| A1 | T, S, M | | Y |
| A1 | | D, E, A, S | Y |
| A2.1 | L, M, V, Q, I, A, T | | V, L, I, M, A, T |
| A3 | L, M, V, I, S, A, T, F, | | K, Y, R, H, F, A |
| | C, G, D | | |
| A11 | V, T, M, L, I, S, A, G, | | K, R, Y, H |
| | N, C, D, F | | |
| A24 | Y, F, W, M | | F, L, I, W |
| A*3101 | M, V, T, A, L, I, S | | R, K |
| A*3301 | M, V, A, L, F, I, S, T | | R, K |
| A*6801 | A, V, T, M, S, L, I | | R, K |
| B*0702 | P | | L, M, F, W, Y, A, I, V |
| B*3501 | P | | L, M, F, W, Y, I, V, A |
| B51 | P | | L, I, V, F, W, Y, A, M |
| B*5301 | P | | I, M, F, W, Y, A, L, V |
| B*5401 | P | | A, T, I, V, L, M, F, W, Y |

Bolded residues are preferred, italicized residues are less preferred: A peptide is considered motif-bearing if it has primary anchors at each primary anchor position for a motif or supermotif as specified in the above table.

[0481] Bolded residues are preferred, italicized residues are less preferred: A peptide is considered motif-bearing if it has primary anchors at each primary anchor position for a motif or supermotif as specified in the above table.

TABLE Ia

| | | | POSITION |
|---|---|---|---|
| | POSITION | POSITION | C Terminus (Primary |
| | 2 (Primary Anchor) | 3 (Primary Anchor) | Anchor) |
| SUPERMOTIFS | | | |
| A1 | T, I, L, V, M, S | | F, W, Y |
| A2 | V, Q, A, T | | I, V, L, M, A, T |
| A3 | V, S, M, A, T, L, I | | R, K |
| A24 | Y, F, W, I, V, L, M, T | | F, I, Y, W, L, M |
| B7 | P | | V, I, L, F, M, W, Y, A |
| B27 | R, H, K | | F, Y, L, W, M, I, V, A |
| B58 | A, T, S | | F, W, Y, L, I, V, M, A |
| B62 | Q, L, I, V, M, P | | F, W, Y, M, I, V, L, A |
| MOTIFS | | | |
| A1 | T, S, M | | Y |
| A1 | | D, E, A, S | Y |
| A2.1 | V, Q, A, T* | | V, L, I, M, A, T |
| A3.2 | L, M, V, I, S, A, T, F, | | K, Y, R, H, F, A |
| | C, G, D | | |
| A11 | V, T, M, L, I, S, A, G, | | K, R, H, Y |
| | N, C, D, F | | |
| A24 | Y, F, W | | F, L, I, W |

*If 2 is V, or Q, the C-term is not L
Bolded residues are preferred, italicized residues are less preferred: A peptide is considered motif-bearing if it has primary anchors at each primary anchor position for a motif or supermotif as specified in the above table.

[0482] Bolded residues are preferred, italicized residues are less preferred: A peptide is considered motif-bearing if it has primary anchors at each primary anchor position for a motif or supermotif as specified in the above table.

TABLE II

| | | POSITION | | | |
|---|---|---|---|---|---|
| | | [symbol] | [symbol] | [symbol] | [symbol] |
| SUPER- | | | | | |
| MOTIFS | | | | | |
| A1 | | | 1° Anchor | | |
| | | | T,I,L,V,M,S | | |
| A2 | | | 1° Anchor | | |
| | | | L,I,V,M,A, | | |
| | | | T,Q | | |
| A3 | preferred | | 1° Anchor | Y,F,W,(4/5) | |
| | | | V,S,M,A,T, | | |
| | | | L,I | | |
| | deleterious | D,E (3/5); P,(5/5) | | D,E,(4/5) | |
| A24 | | | 1° Anchor | | |
| | | | Y,F,W,I,V, | | |
| | | | L,M,T | | |
| B7 | preferred | F,W,Y (5/5) | 1° Anchor | F,W,Y (4/5) | |
| | | L,I,V,M,(3/5) | P | | |
| | deleterious | D,E (3/5); P(5/5); | | | |
| | | G(4/5); A(3/5); | | | |
| | | Q,N,(3/5) | | | |
| B27 | | | 1° Anchor | | |
| | | | R,H,K | | |
| B44 | | | 1° Anchor | | |
| | | | E,D | | |
| B58 | | | 1° Anchor | | |
| | | | A,T,S | | |
| B62 | | | 1° Anchor | | |
| | | | Q,L,I,V,M, | | |
| | | | P | | |
| MOTIFS | | | | | |
| A1 | preferred | G,F,Y,W, | 1° Anchor | D,E,A, | Y,F,W, |
| 9-mer | | | S,T,M, | | |
| | deleterious | D,E, | | R,H,K,L,I,V | A, |
| | | | | M,P, | |
| A1 | preferred | G,R,H,K | A,S,T,C,L,I | 1° Anchor | G,S,T,C, |
| 9-mer | | | V,M, | D,E,A,S | |
| | deleterious | A | R,H,K,D,E, | | D,E, |
| | | | P,Y,F,W, | | |

| | | POSITION | | | | |
|---|---|---|---|---|---|---|
| | | [symbol] | [symbol] | [symbol] | [symbol] | C-terminus |
| SUPER- | | | | | | |
| MOTIFS | | | | | | |
| A1 | | | | | | 1° Anchor |
| | | | | | | F,W,Y |
| A2 | | | | | | 1° Anchor |
| | | | | | | L,I,V,M,A,T |
| A3 | preferred | | Y,F,W, | Y,F,W,(4/5) | P,(4/5) | 1° Anchor |
| | | | (3/5) | | | R,K |
| | deleterious | | | | | |
| A24 | | | | | | 1° Anchor |
| | | | | | | F,I,Y,W,L,M |
| B7 | preferred | | | | F,W,Y, | 1° Anchor |
| | | | | | (3/5) | V,I,L,F,M,W,Y,A |
| | deleterious | D,E,(3/5) | G,(4/5) | Q,N,(4/5) | D,E,(4/5) | |
| B27 | | | | | | 1° Anchor |
| | | | | | | F,Y,L,W,M,V,A |
| B44 | | | | | | 1° Anchor |
| | | | | | | F,W,Y,L,I,M,V,A |
| B58 | | | | | | 1° Anchor |
| | | | | | | F,W,Y,L,I,V,M,A |
| B62 | | | | | | 1° Anchor |
| | | | | | | F,W,Y,M,I,V,L,A |
| MOTIFS | | | | | | |
| A1 | preferred | | P, | D,E,Q,N, | Y,F,W, | 1° Anchor |
| 9-mer | | | | | | Y |
| | deleterious | G, | A, | | | |
| A1 | preferred | | A,S,T,C, | L,I,V,M, | D,E, | 1° Anchor |
| 9-mer | | | | | | Y |
| | deleterious | P,Q,N, | R,H,K, | P,G, | G,P, | |

| | | POSITION | | | | |
|---|---|---|---|---|---|---|
| | | [symbol] | [symbol] | [symbol] | [symbol] | [symbol] |
| A1 | preferred | Y,F,W, | 1° Anchor | D,E,A,Q,N, | A, | Y,F,W,Q,N, |
| 10-mer | | | S,T,M | | | |
| | deleterious | G,P, | | R,H,K,G,L,I | D,E, | R,H,K, |
| | | | | V,M, | | |
| A1 | preferred | Y,F,W, | S,T,C,L,I,V | 1° Anchor | A, | Y,F,W, |
| 10-mer | | | M, | D,E,A,S | | |
| | deleterious | R,H,K, | R,H,K,D,E, | | | P, |
| | | | P,Y,F,W, | | | |
| A2.1 | preferred | Y,F,W, | 1° Anchor | Y,F,W, | S,T,C, | Y,F,W, |
| 9-mer | | | L,M,I,V,Q, | | | |
| | | | A,T | | | |
| | deleterious | D,E,P, | | D,E,R,K,H | | |
| A2.1 | preferred | A,Y,F,W, | 1° Anchor | L,V,I,M, | G, | |
| 10-mer | | | L,M,I,V,Q, | | | |
| | | | A,T | | | |
| | deleterious | D,E,P, | | D,E, | R,K,H,A, | P, |
| A3 | preferred | R,H,K, | 1° Anchor | Y,F,W, | P,R,H,K,Y, | A, |
| | | | L,M,V,I,S, | | F,W, | |
| | | | A,T,F,C,G, | | | |
| | | | D | | | |
| | deleterious | D,E,P, | | D,E | | |
| A11 | preferred | A, | 1° Anchor | Y,F,W, | Y,F,W, | A, |
| | | | V,T,L,M,I, | | | |
| | | | S,A,G,N,C, | | | |
| | | | D,F | | | |
| | deleterious | D,E,P, | | | | |
| A24 | preferred | Y,F,W,R,H,K, | 1° Anchor | | S,T,C | |
| 9-mer | | | Y,F,W,M | | | |
| | deleterious | D,E,G, | | D,E, | G, | Q,N,P, |
| A24 | preferred | | 1° Anchor | | P, | Y,F,W,P, |
| 10-mer | | | Y,F,W,M | | | |
| | deleterious | | | G,D,E | Q,N | R,H,K |
| A3101 | preferred | R,H,K, | 1° Anchor | Y,F,W, | P, | |
| | | | M,V,T,A,L, | | | |
| | | | I,S | | | |
| | deleterious | D,E,P, | | D,E, | | A,D,E, |
| A3301 | preferred | | 1° Anchor | Y,F,W | | |
| | | | M,V,A,L,F, | | | |
| | | | I,S,T | | | |
| | deleterious | G,P | | D,E | | |
| A6801 | preferred | Y,F,W,S,T,C, | 1° Anchor | | | Y,F,W,L,I, |
| | | | A,V,T,M,S, | | | V,M |
| | | | L,I | | | |
| | deleterious | G,P, | | D,E,G, | | R,H,K, |
| B0702 | preferred | R,H,K,F,W,Y, | 1° Anchor | R,H,K, | | R,H,K, |
| | | | P | | | |
| | deleterious | D,E,Q,N,P, | | D,E,P, | D,E, | D,E, |
| B3501 | preferred | F,W,Y,L,I,V,M, | 1° Anchor | F,W,Y, | | |
| | | | P | | | |
| | deleterious | A,G,P, | | | | G, |
| B51 | preferred | L,I,V,M,F,W,Y, | 1° Anchor | F,W,Y, | S,T,C, | F,W,Y, |
| | | | P | | | |
| | deleterious | A,G,P,D,E,R,H,K, | | | | DE, |
| | | S,T,C, | | | | |
| B5301 | preferred | L,I,V,M,F,W,Y, | 1° Anchor | F,W,Y, | S,T,C, | F,W,Y, |
| | | | P | | | |
| | deleterious | A,G,P,Q,N, | | | | |
| B5401 | preferred | F,W,Y, | 1° Anchor | F,W,Y,L,I,V, | | L,I,V,M, |
| | | | P | M, | | |
| | deleterious | G,P,Q,N,D,E, | | G,D,E,S,T,C, | | R,H,K,D,E, |

| | | POSITION | | | | |
|---|---|---|---|---|---|---|
| | | | | | [symbol] | |
| | | | | | or | |
| | | [symbol] | [symbol] | [symbol] | C-terminus | C-terminus |
| A1 | preferred | | P,A,S,T,C, | G,D,E, | P, | 1° Anchor |
| 10-mer | | | | | | Y |
| | deleterious | Q,N,A | R,H,K,Y,F, | R,H,K, | A | |
| | | | W, | | | |
| A1 | preferred | | P,G, | G, | Y,F,W, | 1° Anchor |
| 10-mer | | | | | | Y |
| | deleterious | G, | | P,R,H,K, | Q,N, | |
| A2.1 | preferred | | A, | P | 1° Anchor | |
| 9-mer | | | | | V,L,I,M,A,T | |
| | deleterious | R,K,H | D,E,R,K,H | | | |
| A2.1 | preferred | G, | | F,Y,W,L, | | 1° Anchor |
| 10-mer | | | | V,I,M, | | V,L,I,M,A,T |
| | deleterious | | R,K,H, | D,E,R,K, | R,K,H, | |
| | | | | H, | | |
| A3 | preferred | Y,F,W, | | P, | 1° Anchor | |
| | | | | | K,Y,R,H,F,A | |
| | deleterious | | | | | |
| A11 | preferred | Y,F,W, | Y,F,W, | P, | 1° Anchor | |
| | | | | | K,,RY,H | |
| | deleterious | | A | G | | |
| A24 | preferred | | Y,F,W, | Y,F,W, | 1° Anchor | |
| 9-mer | | | | | F,L,I,W | |
| | deleterious | D,E,R,H,K, | G, | A,Q,N, | | |
| A24 | preferred | | P, | | | 1° Anchor |
| 10-mer | | | | | | F,L,I,W |
| | deleterious | D,E | A | Q,N, | D,E,A, | |
| A3101 | preferred | Y,F,W, | Y,F,W, | A,P, | 1° Anchor | |
| | | | | | R,K | |
| | deleterious | D,E, | D,E, | D,E, | | |
| A3301 | preferred | | A,Y,F,W | | 1° Anchor | |
| | | | | | R,K | |
| | deleterious | | | | | |
| A6801 | preferred | | Y,F,W, | P, | 1° Anchor | |
| | | | | | R,K | |
| | deleterious | | | A, | | |
| B0702 | preferred | R,H,K, | R,H,K, | P,A, | 1° Anchor | |
| | | | | | L,M,F,W,Y,A, | |
| | | | | | I,V | |
| | deleterious | G,D,E, | Q,N, | D,E, | | |
| B3501 | preferred | | F,W,Y, | | 1° Anchor | |
| | | | | | L,M,F,W,Y,I, | |
| | | | | | V,A | |
| | deleterious | G, | | | | |
| B51 | preferred | | G, | F,W,Y, | 1° Anchor | |
| | | | | | L,I,V,F,W, | |
| | | | | | Y,A,M | |
| | deleterious | G, | D,E,Q,N, | G,D,E, | | |
| B5301 | preferred | | L,I,V,M,F, | F,W,Y, | 1° Anchor | |
| | | | W,Y, | | I,M,F,W,Y, | |
| | | | | | A,L,V | |
| | deleterious | G, | R,H,K,Q,N, | D,E, | | |
| B5401 | preferred | | A,L,I,V,M, | F,W,Y,A,P, | 1° Anchor | |
| | | | | | A,T,I,V,L, | |
| | | | | | M,F,W,Y | |
| | deleterious | D,E, | Q,N,D,G,E, | D,E, | | |

Italicized residues indicate less preferred or “tolerated” residues.
The information in Table II is specific for 9-mers unless otherwise specified.
Secondary anchor specificities are designated for each position independently.

[0483] TABLE III
POSITION

| MOTIFS | | [symbol] | [symbol] | [symbol] | [symbol] | [symbol] | [symbol] | [symbol] | [symbol] | [symbol] |
|---|---|---|---|---|---|---|---|---|---|---|
| DR4 | preferred | F,M,Y,L,I, | M, | T, | | I, | V,S,T,C,P,A, | M,H, | | M,H |
| | | V,W, | | | | | L,I,M, | | | |
| | deleterious | | | | W, | | | R, | | W,D,E |
| DR1 | preferred | M,F,L,I,V, | | | P,A,M,Q, | | V,M,A,T,S,P, | M, | | A,V,M |
| | | W,Y, | | | | | L,I,C, | | | |
| | deleterious | | C, | C,H | F,D, | C,W,D, | | G,D,E, | D | |
| DR7 | preferred | M,F,L,I,V, | M, | W, | A, | | I,V,M,S,A,C, | M, | | I,V |
| | | W,Y, | | | | | T,P,L, | | | |
| | deleterious | | C, | | G, | | | G,R,D, | N, | G |
| DR Supermotif | | M,F,L,I,V, | | | | | V,M,S,T,A,C, | | | |
| | | W,Y | | | | | P,L,I | | | |

| DR3 MOTIFS | [symbol] | [symbol] | [symbol] | [symbol] | [symbol] | [symbol] |
|---|---|---|---|---|---|---|
| motif a | L,I,V,M,F, | | | | | |
| preferred | Y | | | D | | |
| motif b | L,I,V,M,F, | | | D,N,Q,E, | | |
| preferred | A,Y | | | S,T | | K,R,H |

Italicized residues indicate less preferred or “tolerated” residues.
Secondary anchor specificities are designated for each position independently.

[0484] TABLE IV
HLA Class I Standard Peptide Binding Affinity.

| | | | STANDARD |
|---|---|---|---|
| | STANDARD | SEQUENCE | BINDING AFFINITY |
| ALLELE | PEPTIDE | (SEQ ID NO:) | (nM) |
| A*0101 | 944.02 | YLEPAIAKY | 25 |
| M*0201 | 941.01 | FLPSDYFPSV | 5.0 |
| A*0202 | 941.01 | FLPSDYFPSV | 4.3 |
| A*0203 | 941.01 | FLPSDYFPSV | 10 |
| A*0205 | 941.01 | FLPSDYFPSV | 4.3 |
| A*0206 | 941.01 | FLPSDYFPSV | 3.7 |
| A*0207 | 941.01 | FLPSDYFPSV | 23 |
| A*6802 | 1072.34 | YVIKVSARV | 8.0 |
| A*0301 | 941.12 | KVFPYALINK | 11 |
| A*110l | 940.06 | AVDLYHFLK | 6.0 |
| A*3101 | 941.12 | KVFPYALINK | 18 |
| A*3301 | 1083.02 | STLPETYVVRR | 29 |
| A*6801 | 941.12 | KVFPYALINK | 8.0 |
| A*2402 | 979.02 | AYIDNYNKF | 12 |
| B*0702 | 1075.23 | APRTLVYLL | 5.5 |
| B*3501 | 1021.05 | FPFKYAAAF | 7.2 |
| B51 | 1021.05 | FPFKYAAAF | 5.5 |
| B*5301 | 1021.05 | FPFKYAAAF | 9.3 |
| B*5401 | 1021.05 | FPFKYAAAF | 10 |

SF 1199173 v1

[0485] TABLE V
HLA Class II Standard Peptide Binding Affinity.

| | | | | Binding |
|---|---|---|---|---|
| | | Standard | Sequence | Affinity |
| Allele | Nomenclature | Peptide | (SEQ ID NO:) | (nM) |
| DRB1*0101 | DR1 | 515.01 | PKYVKQNTLKLAT | 5.0 |
| DRB1*0301 | DR3 | 829.02 | YKTIAFDEEARR | 300 |
| DRB1*0401 | DR4w4 | 515.01 | PKYVKQNTLKLAT | 45 |
| DRB1*0404 | DR4w14 | 717.01 | YARFQSQTTLKQKT | 50 |
| DRB1*0405 | DR4w15 | 717.01 | YARFQSQTTLKQKT | 38 |
| DRB1*0701 | DR7 | 553.01 | QYIKANSKFIGITE | 25 |
| DRB1*0802 | DR8w2 | 553.01 | QYIKANSKFIGITE | 49 |
| DRB1*0803 | DRSw3 | 553.01 | QYIKANSKFIGITE | 1600 |
| DRB1*0901 | DR9 | 553.01 | QYIKANSKFIGITE | 75 |
| DRB1*1101 | DR5w11 | 553.01 | QYIKANSKFIGITE | 20 |
| DRB1*1201 | DR5w12 | 1200.05 | EALIHQLKINPYVLS | 298 |
| DRB1*1302 | DR6w19 | 650.22 | QYIKANAKFIGITE | 3.5 |
| DRB1*1501 | DR2w2β1 | 507.02 | GRTQDENPVVHFFKNIVTPRTPPP | 9.1 |
| DRB3*0101 | DR52a | 511 | NGQIGNDPNRDIL | 470 |
| DRB4*0101 | DRw53 | 717.01 | YARFQSQTTLKQKT | 58 |
| DRB5*0101 | DR2w2P2 | 553.01 | QYIKANSKFIGITE | 20 |

[0486] TABLE VI
Allelle-specific HLA-supertype members

| HLA- | | |
|---|---|---|
| super- | | |
| type | Verified^{a} | Predicted^{b} |
| A1 | A*0101, A*2501, A*2601, A*2602, A*3201 | A*0102, A*2604, A*3601, A*4301, A*8001 |
| A2 | A*0201, A*0202, A*0203, A*0204, A*0205, A*0206, A*0207, | A*0208, A*0210, A*0211, A*0212, A*0213 |
| | A*0209, A*0214, A*6802, A*6901 | |
| A3 | A*0301, A*1101, A*3101, A*3301, A*6801 | A*0302, A*1102, A*2603, A*3302, A*3303, A*3401, |
| | | A*3402, A*6601, A*6602, A*7401 |
| A24 | A*2301, A*2402, A*3001 | A*2403, A*2404, A*3002, A*3003 |
| B7 | B*0702, B*0703, B*0704, B*0705, B*1508, B*3501, B*3502, B*3503, | B*1511, B*4201, B*5901 |
| | B*3503, B*3504, B*3505, B*3506, B*3507, B*3508, B*5101, B*5102, | |
| | B*5103, B*5104, B*5105, B*5301, B*5401, B*5501, B*5502, B*5601, | |
| | B*5602, B*6701, B*7801 | |
| B27 | B*1401, B*1402, B*1509, B*2702, B*2703, B*2704, B*2705, B*2706, | B*2701, B*2707, B*2708, B*3802, B*3903, B*3904, |
| | B*3801, B*3901, B*3902, B*7301 | B*3905, B*4801, B*4802, B*1510, B*1518, B*1503 |
| B44 | B*1801, B*1802, B*3701, B*4402, B*4403, B*4404, B*4001, B*4002, | B*4101, B*4501, B*4701, B*4901, B*5001 |
| | B*4006 | |
| B58 | B*5701, B*5702, B*5801, B*5802, B*1516, B*1517 | |
| B62 | B*1501, B*1502, B*1513, B*5201 | B*1301, B*1302, B*1504, B*1505, B*1506, B*1507, |
| | | B*1515, B*1520, B*1521, B*1512, B*1514, B*1510 |

^{a}Verified alleles include alleles whose specificity has been determined by pool sequencing analysis, peptide binding assays, or by analysis of the sequences of CTL epitopes.
^{b}Predicted alleles are alleles whose specificity is predicted on the basis of B and F pocket structure to overlap with the supertype specificity.

[0487] TABLE VII A
Mage 2 A01 Supermotif Peptides with Binding Data

| | No. of | |
|---|---|---|
| Position | Amino Acids | A*0101 |
| 154 | 9 | |
| 68 | 10 | 0.1700 |
| 249 | 10 | |
| 224 | 8 | |
| 115 | 10 | |
| 137 | 10 | |
| 137 | 11 | |
| 229 | 11 | |
| 168 | 9 | 0.0028 |
| 71 | 10 | |
| 263 | 9 | |
| 263 | 11 | |
| 63 | 9 | |
| 177 | 10 | |
| 109 | 11 | |
| 292 | 10 | |
| 112 | 8 | |
| 245 | 11 | |
| 246 | 10 | 0.0450 |
| 116 | 9 | |
| 250 | 9 | |
| 178 | 9 | |
| 148 | 10 | |
| 260 | 10 | |
| 96 | 10 | |
| 69 | 9 | 0.0430 |
| 72 | 9 | |
| 138 | 9 | |
| 138 | 10 | |
| 73 | 8 | |
| 149 | 9 | |
| 139 | 8 | |
| 139 | 9 | |
| 179 | 8 | |
| 166 | 11 | 0.2000 |
| 169 | 8 | |
| 176 | 11 | |

[0488] TABLE VII B
Mage 3 A01 Supermotif Peptides with Binding Data

| | No. of | |
|---|---|---|
| Position | Amino Acids | A*0101 |
| 68 | 10 | 2.6000 |
| 154 | 9 | |
| 179 | 8 | 0.1100 |
| 224 | 8 | |
| 115 | 10 | |
| 134 | 10 | |
| 168 | 9 | 18.0000 |
| 168 | 11 | |
| 250 | 9 | |
| 263 | 9 | |
| 263 | 11 | |
| 137 | 9 | 0.0500 |
| 137 | 10 | |
| 137 | 11 | |
| 298 | 10 | |
| 293 | 9 | 0.0370 |
| 299 | 9 | |
| 292 | 10 | 0.0011 |
| 112 | 8 | |
| 245 | 11 | |
| 166 | 11 | 7.5000 |
| 109 | 11 | |
| 246 | 10 | 0.2600 |
| 116 | 9 | |
| 135 | 9 | |
| 135 | 11 | |
| 171 | 8 | |
| 95 | 11 | |
| 72 | 9 | |
| 260 | 10 | |
| 70 | 8 | |
| 70 | 11 | |
| 69 | 9 | 0.0550 |
| 155 | 8 | |
| 96 | 10 | |
| 138 | 8 | |
| 138 | 9 | |
| 138 | 10 | |
| 74 | 11 | 0.0830 |
| 73 | 8 | |
| 139 | 8 | |
| 139 | 9 | |
| 176 | 11 | |

[0489] TABLE VIII A
Mage 2 A02 Supermotif with Binding Data

| | No. of | | | | | |
|---|---|---|---|---|---|---|
| Position | Amino Acids | A*0201 | A*0202 | A*0203 | A*0206 | A*6802 |
| 107 | 8 | | | | | |
| 107 | 10 | 0.0001 | | | | |
| 107 | 11 | | | | | |
| 207 | 10 | 0.0023 | | | | |
| 108 | 9 | 0.0003 | | | | |
| 108 | 10 | 0.0001 | | | | |
| 22 | 9 | 0.0030 | | | | |
| 22 | 11 | | | | | |
| 277 | 8 | | | | | |
| 277 | 10 | 0.0100 | 0.0059 | 0.0800 | 0.0019 | 0.0130 |
| 277 | 11 | | | | | |
| 28 | 11 | | | | | |
| 32 | 8 | | | | | |
| 215 | 11 | | | | | |
| 181 | 9 | 0.0004 | | | | |
| 181 | 10 | 0.0001 | | | | |
| 143 | 8 | | | | | |
| 100 | 8 | | | | | |
| 100 | 9 | 0.0001 | | | | |
| 100 | 10 | 0.0001 | | | | |
| 249 | 8 | | | | | |
| 21 | 8 | | | | | |
| 21 | 10 | 0.0001 | | | | |
| 17 | 9 | 0.0001 | | | | |
| 17 | 10 | 0.0001 | | | | |
| 115 | 8 | | | | | |
| 35 | 10 | | | | | |
| 35 | 11 | | | | | |
| 280 | 8 | | | | | |
| 280 | 11 | | | | | |
| 229 | 10 | 0.0003 | | | | |
| 47 | 9 | 0.0001 | | | | |
| 47 | 10 | 0.0001 | | | | |
| 165 | 8 | | | | | |
| 165 | 11 | | | | | |
| 168 | 8 | | | | | |
| 168 | 10 | 0.0002 | | | | |
| 168 | 11 | | | | | |
| 239 | 8 | | | | | |
| 239 | 9 | | | | | |
| 119 | 8 | | | | | |
| 271 | 8 | | | | | |
| 271 | 9 | 0.0470 | | | | |
| 271 | 11 | | | | | |
| 105 | 9 | | | | | |
| 105 | 10 | | | | | |
| 67 | 8 | | | | | |
| 67 | 9 | 0.0001 | | | | |
| 163 | 8 | | | | | |
| 163 | 10 | 0.0002 | | | | |
| 15 | 8 | | | | | |
| 15 | 9 | 0.0001 | | | | |
| 15 | 11 | | | | | |
| 188 | 8 | | | | | |
| 188 | 9 | 0.0038 | | | | |
| 200 | 8 | | | | | |
| 200 | 9 | 0.0002 | | | | |
| 200 | 10 | 0.0005 | | | | |
| 200 | 11 | | | | | |
| 183 | 8 | | | | | |
| 24 | 9 | 0.0003 | | | | |
| 24 | 10 | 0.0004 | | | | |
| 298 | 11 | | | | | |
| 174 | 9 | 0.0034 | | | | |
| 174 | 11 | | | | | |
| 289 | 11 | | | | | |
| 209 | 8 | | | | | |
| 208 | 9 | 0.0001 | | | | |
| 203 | 8 | | | | | |
| 203 | 9 | 0.0009 | | | | |
| 177 | 8 | | | | | |
| 204 | 8 | | | | | |
| 132 | 8 | | | | | |
| 132 | 9 | 0.0001 | | | | |
| 153 | 8 | | | | | |
| 153 | 9 | 0.0110 | | | | |
| 292 | 8 | | | | | |
| 220 | 8 | | | | | |
| 220 | 9 | 0.0300 | 0.0067 | 0.0570 | 0.1300 | 0.0017 |
| 220 | 11 | 0.2800 | | | | |
| 244 | 8 | | | | | |
| 112 | 9 | 0.1600 | | | | |
| 112 | 10 | 0.1100 | | | | |
| 112 | 11 | 0.6700 | 0.4500 | 6.0000 | 0.6000 | 0.2200 |
| 198 | 8 | | | | | |
| 198 | 9 | 0.0002 | | | | |
| 198 | 10 | 0.0002 | | | | |
| 198 | 11 | | | | | |
| 285 | 9 | 0.0008 | | | | |
| 206 | 11 | | | | | |
| 278 | 9 | 0.0001 | | | | |
| 278 | 10 | 0.0003 | | | | |
| 202 | 8 | | | | | |
| 202 | 9 | 0.0008 | | | | |
| 202 | 10 | 0.0013 | | | | |
| 189 | 8 | | | | | |
| 189 | 11 | | | | | |
| 201 | 8 | | | | | |
| 201 | 9 | 0.0001 | | | | |
| 201 | 10 | 0.0002 | | | | |
| 201 | 11 | | | | | |
| 121 | 10 | 0.0001 | | | | |
| 121 | 11 | | | | | |
| 120 | 11 | 0.0001 | | | | |
| 246 | 11 | | | | | |
| 158 | 9 | | | | | |
| 158 | 10 | | | | | |
| 45 | 9 | 0.0001 | | | | |
| 45 | 11 | | | | | |
| 160 | 8 | | | | | |
| 160 | 10 | 0.0120 | | | | |
| 160 | 11 | | | | | |
| 25 | 8 | | | | | |
| 25 | 9 | 0.0001 | | | | |
| 116 | 11 | | | | | |
| 247 | 10 | | | | | |
| 113 | 8 | | | | | |
| 113 | 9 | 0.0031 | | | | |
| 113 | 10 | 0.0017 | | | | |
| 89 | 9 | | | | | |
| 193 | 9 | | | | | |
| 193 | 10 | | | | | |
| 193 | 11 | | | | | |
| 31 | 8 | | | | | |
| 31 | 9 | | | | | |
| 171 | 8 | | | | | |
| 171 | 9 | 0.0005 | | | | |
| 171 | 10 | 0.0003 | | | | |
| 65 | 9 | | | | | |
| 65 | 10 | | | | | |
| 65 | 11 | | | | | |
| 148 | 11 | | | | | |
| 129 | 8 | | | | | |
| 129 | 11 | | | | | |
| 106 | 8 | | | | | |
| 106 | 9 | 0.0001 | | | | |
| 106 | 11 | | | | | |
| 29 | 10 | | | | | |
| 29 | 11 | | | | | |
| 159 | 8 | | | | | |
| 159 | 9 | 0.0038 | | | | |
| 159 | 11 | 0.0018 | | | | |
| 36 | 9 | | | | | |
| 36 | 10 | | | | | |
| 36 | 11 | | | | | |
| 37 | 8 | | | | | |
| 37 | 9 | 0.0002 | | | | |
| 37 | 10 | 0.0003 | | | | |
| 194 | 8 | | | | | |
| 194 | 9 | 0.0001 | | | | |
| 194 | 10 | 0.0002 | | | | |
| 194 | 11 | | | | | |
| 260 | 8 | | | | | |
| 276 | 9 | 0.0017 | | | | |
| 276 | 11 | | | | | |
| 125 | 9 | | | | | |
| 125 | 11 | | | | | |
| 259 | 9 | | | | | |
| 7 | 10 | | | | | |
| 43 | 8 | | | | | |
| 43 | 11 | 0.0140 | | | | |
| 72 | 8 | | | | | |
| 237 | 9 | 0.0046 | | | | |
| 237 | 10 | 0.0011 | | | | |
| 237 | 11 | | | | | |
| 38 | 8 | | | | | |
| 38 | 9 | 0.0001 | | | | |
| 38 | 11 | | | | | |
| 49 | 8 | | | | | |
| 290 | 10 | 0.0001 | | | | |
| 44 | 10 | 0.0250 | 0.0420 | 1.6000 | 0.0039 | 0.1600 |
| 149 | 10 | 0.0014 | | | | |
| 286 | 8 | | | | | |
| 139 | 11 | | | | | |
| 195 | 8 | | | | | |
| 195 | 9 | 0.0010 | | | | |
| 195 | 10 | 0.0009 | | | | |
| 195 | 11 | | | | | |
| 251 | 11 | | | | | |
| 179 | 11 | | | | | |
| 130 | 10 | | | | | |
| 130 | 11 | | | | | |
| 48 | 8 | | | | | |
| 48 | 9 | 0.0045 | | | | |
| 166 | 10 | 0.0002 | | | | |
| 169 | 9 | 0.0002 | | | | |
| 169 | 10 | 0.0002 | | | | |
| 169 | 11 | | | | | |
| 176 | 9 | 0.0014 | | | | |
| 157 | 8 | | | | | |
| 157 | 10 | 0.3700 | | | | |
| 157 | 11 | | | | | |
| 283 | 8 | | | | | |
| 283 | 9 | 0.0001 | | | | |
| 283 | 11 | | | | | |

[0490] TABLE VIII B
Mage 3 A02 Supermotif with Binding Data

| | No. of | | | | | |
|---|---|---|---|---|---|---|
| Position | Amino Acids | A*0201 | A*0202 | A*0203 | A*0206 | A*6802 |
| 107 | 8 | | | | | |
| 107 | 10 | 0.0007 | | | | |
| 107 | 11 | | | | | |
| 38 | 8 | | | | | |
| 38 | 9 | 0.0001 | | | | |
| 38 | 11 | | | | | |
| 207 | 10 | 0.0002 | | | | |
| 22 | 9 | 0.0030 | | | | |
| 22 | 11 | | | | | |
| 108 | 9 | 0.0050 | | | | |
| 108 | 10 | 0.0001 | | | | |
| 277 | 8 | | | | | |
| 277 | 10 | 0.0024 | | | | |
| 277 | 11 | | | | | |
| 28 | 11 | | | | | |
| 179 | 11 | | | | | |
| 32 | 8 | | | | | |
| 215 | 11 | | | | | |
| 181 | 9 | 0.0004 | | | | |
| 181 | 10 | 0.0001 | | | | |
| 100 | 8 | | | | | |
| 100 | 9 | 0.0001 | | | | |
| 100 | 10 | 0.0001 | | | | |
| 37 | 8 | | | | | |
| 37 | 9 | 0.0001 | | | | |
| 37 | 10 | 0.0001 | | | | |
| 21 | 8 | | | | | |
| 21 | 10 | 0.0001 | | | | |
| 17 | 9 | 0.0001 | | | | |
| 17 | 10 | 0.0001 | | | | |
| 165 | 8 | | | | | |
| 165 | 11 | 0.0260 | | | | |
| 115 | 8 | | | | | |
| 35 | 10 | | | | | |
| 35 | 11 | | | | | |
| 280 | 8 | | | | | |
| 280 | 11 | | | | | |
| 168 | 8 | | | | | |
| 168 | 10 | 0.0002 | | | | |
| 229 | 10 | 0.0001 | | | | |
| 229 | 11 | | | | | |
| 47 | 9 | 0.0001 | | | | |
| 47 | 10 | 0.0001 | | | | |
| 119 | 8 | | | | | |
| 271 | 8 | | | | | |
| 271 | 9 | 0.0820 | 0.0500 | 0.9100 | 0.0043 | 1.1000 |
| 271 | 11 | | | | | |
| 105 | 9 | | | | | |
| 105 | 10 | | | | | |
| 67 | 8 | | | | | |
| 67 | 9 | 0.0001 | | | | |
| 163 | 10 | 0.0002 | | | | |
| 15 | 8 | | | | | |
| 15 | 9 | 0.0001 | | | | |
| 15 | 11 | | | | | |
| 188 | 8 | | | | | |
| 188 | 9 | | | | | |
| 200 | 8 | | | | | |
| 200 | 9 | 0.0002 | | | | |
| 200 | 10 | 0.0005 | | | | |
| 200 | 11 | | | | | |
| 183 | 8 | | | | | |
| 24 | 9 | 0.0003 | | | | |
| 24 | 10 | 0.0004 | | | | |
| 298 | 11 | | | | | |
| 174 | 9 | 0.0003 | | | | |
| 174 | 11 | 0.0410 | 0.0140 | 0.1500 | 0.0029 | 0.1500 |
| 289 | 11 | | | | | |
| 209 | 8 | | | | | |
| 208 | 9 | 0.0001 | | | | |
| 203 | 8 | | | | | |
| 238 | 8 | | | | | |
| 238 | 9 | 0.0001 | | | | |
| 238 | 10 | 0.0001 | | | | |
| 195 | 8 | | | | | |
| 195 | 9 | 0.0064 | | | | |
| 195 | 10 | 0.0015 | | | | |
| 195 | 11 | 0.0130 | | | | |
| 132 | 8 | | | | | |
| 132 | 9 | 0.0001 | | | | |
| 198 | 8 | | | | | |
| 198 | 9 | 0.0002 | | | | |
| 198 | 10 | 0.0002 | | | | |
| 198 | 11 | | | | | |
| 153 | 8 | | | | | |
| 153 | 9 | 0.0005 | | | | |
| 292 | 8 | | | | | |
| 220 | 8 | | | | | |
| 220 | 9 | 0.0140 | 0.0064 | 0.0073 | 0.0590 | 0.0012 |
| 220 | 11 | | | | | |
| 244 | 8 | | | | | |
| 112 | 9 | 0.0550 | | | | |
| 112 | 10 | 0.0120 | | | | |
| 112 | 11 | | | | | |
| 285 | 9 | 0.0026 | | | | |
| 206 | 11 | | | | | |
| 202 | 8 | | | | | |
| 202 | 9 | 0.0008 | | | | |
| 189 | 8 | | | | | |
| 189 | 11 | | | | | |
| 201 | 8 | | | | | |
| 201 | 9 | 0.0001 | | | | |
| 201 | 10 | 0.0002 | | | | |
| 121 | 10 | 0.0001 | | | | |
| 121 | 11 | | | | | |
| 120 | 11 | 0.0001 | | | | |
| 166 | 10 | 0.0005 | | | | |
| 158 | 9 | | | | | |
| 158 | 10 | | | | | |
| 246 | 11 | | | | | |
| 278 | 9 | 0.0001 | | | | |
| 278 | 10 | 0.0002 | | | | |
| 45 | 9 | 0.0001 | | | | |
| 45 | 11 | | | | | |
| 160 | 8 | | | | | |
| 160 | 10 | 0.1100 | | | | |
| 25 | 8 | | | | | |
| 25 | 9 | 0.0001 | | | | |
| 116 | 11 | | | | | |
| 290 | 10 | 0.0002 | | | | |
| 89 | 9 | | | | | |
| 193 | 9 | | | | | |
| 193 | 10 | | | | | |
| 193 | 11 | | | | | |
| 31 | 8 | | | | | |
| 31 | 9 | 0.0001 | | | | |
| 171 | 9 | 0.0001 | | | | |
| 171 | 10 | 0.0003 | | | | |
| 65 | 9 | | | | | |
| 65 | 10 | | | | | |
| 65 | 11 | | | | | |
| 62 | 10 | | | | | |
| 72 | 8 | | | | | |
| 148 | 11 | | | | | |
| 129 | 8 | | | | | |
| 129 | 11 | | | | | |
| 106 | 8 | | | | | |
| 106 | 9 | 0.0001 | | | | |
| 106 | 11 | | | | | |
| 29 | 10 | 0.0001 | | | | |
| 29 | 11 | | | | | |
| 194 | 8 | | | | | |
| 194 | 9 | 0.0001 | | | | |
| 194 | 10 | 0.0006 | | | | |
| 194 | 11 | | | | | |
| 159 | 8 | | | | | |
| 159 | 9 | 0.0010 | | | | |
| 159 | 11 | 0.3400 | | | | |
| 260 | 8 | | | | | |
| 276 | 9 | 0.0001 | | | | |
| 276 | 11 | | | | | |
| 125 | 9 | | | | | |
| 125 | 11 | | | | | |
| 259 | 9 | | | | | |
| 237 | 9 | 0.0001 | | | | |
| 237 | 10 | 0.0002 | | | | |
| 237 | 11 | | | | | |
| 70 | 10 | 0.0035 | | | | |
| 157 | 8 | | | | | |
| 157 | 10 | 0.0049 | | | | |
| 157 | 11 | | | | | |
| 7 | 10 | | | | | |
| 43 | 8 | | | | | |
| 43 | 11 | 0.0140 | | | | |
| 49 | 8 | | | | | |
| 44 | 10 | 0.0250 | 0.0320 | 1.6000 | 0.0039 | 0.1600 |
| 247 | 10 | | | | | |
| 113 | 8 | | | | | |
| 113 | 9 | 0.0001 | | | | |
| 113 | 10 | 0.0009 | | | | |
| 149 | 10 | 0.0001 | | | | |
| 286 | 8 | | | | | |
| 251 | 11 | | | | | |
| 130 | 10 | 0.0002 | | | | |
| 130 | 11 | | | | | |
| 48 | 8 | | | | | |
| 48 | 9 | 0.0045 | | | | |
| 139 | 11 | | | | | |
| 143 | 8 | | | | | |
| 176 | 9 | 0.0180 | | | | |
| 283 | 8 | | | | | |
| 283 | 9 | 0.0001 | | | | |
| 283 | 11 | | | | | |

[0491] TABLE IX A
Mage 2 A03 Supermotif with Binding Data

| | No. of | | | | | |
|---|---|---|---|---|---|---|
| Position | Amino Acids | A*0301 | A*1101 | A*3101 | A*3301 | A*6801 |
| 210 | 11 | 0.0009 | 0.0007 | | | |
| 277 | 9 | 0.0810 | 0.1900 | 0.0200 | 0.0003 | 0.0280 |
| 249 | 11 | 0.0047 | 0.0018 | | | |
| 236 | 8 | −0.0004 | 0.0005 | | | |
| 236 | 9 | 0.0021 | 0.0025 | 0.0006 | 0.0190 | 0.0460 |
| 224 | 11 | 0.0016 | 0.0008 | | | |
| 115 | 9 | 0.0045 | 0.0011 | | | |
| 115 | 11 | 0.0011 | 0.0031 | | | |
| 134 | 8 | −0.0009 | −0.0003 | | | |
| 102 | 10 | 0.0002 | 0.0002 | | | |
| 102 | 11 | 0.0010 | 0.0004 | | | |
| 119 | 9 | | | | | |
| 71 | 11 | 0.0110 | 0.0170 | 0.0700 | 0.0074 | 0.0490 |
| 188 | 11 | 0.0780 | 0.0047 | −0.0006 | −0.0013 | −0.0001 |
| 86 | 11 | −0.0002 | −0.0002 | | | |
| 298 | 10 | 0.0074 | 0.0018 | | | |
| 299 | 9 | 0.0340 | 0.0280 | 0.7700 | 0.8100 | 0.0990 |
| 132 | 10 | 0.0002 | 0.0009 | 0.0084 | 0.0047 | 0.0004 |
| 285 | 8 | 0.0053 | 0.0100 | | | |
| 278 | 8 | −0.0004 | 0.0027 | | | |
| 189 | 10 | 0.0093 | 0.0014 | | | |
| 120 | 8 | −0.0009 | −0.0004 | | | |
| 225 | 10 | −0.0004 | 0.0001 | | | |
| 116 | 8 | 0.0290 | 0.1500 | 0.0007 | −0.0009 | 0.0200 |
| 116 | 10 | 0.0260 | 0.0022 | | | |
| 250 | 10 | 0.0027 | 0.0089 | | | |
| 227 | 8 | −0.0009 | −0.0004 | | | |
| 113 | 11 | 0.0200 | 0.0120 | 0.0038 | 0.0056 | 0.0220 |
| 266 | 11 | −0.0009 | −0.0002 | | | |
| 2 | 10 | 0.0003 | 0.0002 | | | |
| 303 | 8 | −0.0009 | −0.0004 | | | |
| 276 | 10 | 0.0200 | 0.0750 | 0.0064 | 0.0003 | 0.0026 |
| 125 | 8 | −0.0009 | −0.0003 | | | |
| 226 | 9 | 0.0020 | 0.0220 | 0.4900 | 3.2000 | 0.0044 |
| 87 | 10 | 0.0002 | 0.0002 | | | |
| 72 | 10 | 0.0014 | 0.0910 | | | |
| 237 | 8 | 0.1410 | 0.0810 | 0.0130 | 0.0010 | 0.0440 |
| 74 | 8 | 0.0140 | 0.0550 | 0.0250 | 0.0370 | 0.3800 |
| 73 | 9 | 0.0890 | 1.1000 | | | |
| 283 | 10 | 0.0033 | 0.0160 | 0.0005 | −0.0009 | 0.0360 |

[0492] TABLE IX B
Mage 3 A03 Supermotif with Binding Data

| | No.of | | | | | |
|---|---|---|---|---|---|---|
| Position | Amino acids | A*0301 | A*1101 | A*3101 | A*3301 | A*6801 |
| 277 | 9 | 0.0270 | 0.1700 | 0.0009 | 0.0004 | 0.0022 |
| 236 | 8 | −0.0004 | −0.0003 | | | |
| 236 | 9 | −0.0003 | −0.0002 | | | |
| 224 | 11 | −0.0009 | 0.0023 | | | |
| 115 | 9 | 0.0045 | 0.0011 | | | |
| 115 | 11 | 0.0011 | 0.0031 | | | |
| 102 | 10 | 0.0002 | 0.0002 | | | |
| 102 | 11 | 0.0002 | 0.0004 | | | |
| 119 | 9 | | | | | |
| 250 | 10 | 0.0009 | 0.0012 | | | |
| 188 | 11 | 0.1300 | 0.0570 | −0.0006 | −0.0013 | −0.0001 |
| 203 | 9 | 0.0069 | 0.0011 | | | |
| 204 | 8 | 0.0053 | 0.037 | | | |
| 285 | 8 | 0.00580 | 0.0190 | 0.0012 | 0.0052 | −0.0001 |
| 202 | 10 | 0.0280 | 0.0021 | | | |
| 189 | 10 | 0.0200 | 0.0110 | | | |
| 201 | 11 | 0.0021 | 0.0056 | | | |
| 120 | 8 | −0.0009 | −0.0004 | | | |
| 225 | 10 | −0.0006 | 0.0030 | | | |
| 278 | 8 | −0.0004 | 0.0014 | | | |
| 116 | 8 | 0.0290 | 0.1500 | 0.0007 | −0.0009 | 0.0200 |
| 116 | 10 | 0.0260 | 0.0022 | | | |
| 266 | 11 | 0.0009 | −0.0002 | | | |
| 2 | 10 | 0.0003 | 0.0002 | | | |
| 303 | 8 | 0.0009 | −0.0003 | | | |
| 276 | 10 | 0.0190 | 0.1100 | 0.0034 | 0.0003 | 0.0004 |
| 125 | 8 | −0.0009 | −0.0003 | | | |
| 237 | 8 | −0.0009 | 0.0012 | | | |
| 226 | 9 | 0.0003 | 0.1400 | 0.1700 | 0.6600 | 0.0860 |
| 113 | 11 | −0.0002 | 0.0011 | | | |
| 227 | 8 | 0.0016 | 0.0005 | | | |
| 283 | 10 | 0.0020 | 0.0061 | | | |

[0493] TABLE XA
Mage 2 A24 Supermotif Peptides with Binding Data

| | No. of | |
|---|---|---|
| Position | Amino Acids | A [symbol] 2401 |
| 108 | 9 | |
| 277 | 11 | |
| 181 | 9 | |
| 181 | 10 | |
| 268 | 11 | 0.0004 |
| 100 | 10 | |
| 249 | 8 | |
| 270 | 9 | 0.0006 |
| 270 | 10 | 0.0097 |
| 104 | 10 | 0.0002 |
| 224 | 8 | |
| 115 | 8 | |
| 115 | 10 | |
| 280 | 8 | |
| 229 | 11 | |
| 165 | 8 | |
| 165 | 11 | |
| 168 | 8 | |
| 168 | 9 | |
| 168 | 10 | |
| 168 | 11 | |
| 156 | 9 | 3.5000 |
| 271 | 8 | |
| 271 | 9 | |
| 163 | 10 | |
| 15 | 9 | |
| 15 | 11 | |
| 188 | 9 | |
| 200 | 9 | |
| 200 | 10 | |
| 183 | 8 | |
| 174 | 9 | |
| 174 | 11 | |
| 289 | 11 | |
| 150 | 8 | |
| 150 | 9 | 0.0200 |
| 150 | 11 | 0.0950 |
| 203 | 9 | |
| 177 | 8 | |
| 177 | 10 | |
| 204 | 8 | |
| 221 | 8 | 0.0007 |
| 221 | 11 | 0.0170 |
| 292 | 8 | |
| 292 | 10 | |
| 220 | 8 | |
| 220 | 9 | |
| 112 | 8 | 0.0005 |
| 112 | 9 | |
| 112 | 10 | |
| 112 | 11 | |
| 198 | 9 | |
| 198 | 11 | |
| 285 | 9 | |
| 278 | 10 | |
| 202 | 8 | |
| 202 | 10 | |
| 189 | 8 | |
| 201 | 8 | |
| 201 | 9 | |
| 201 | 11 | |
| 245 | 11 | |
| 246 | 10 | |
| 246 | 11 | |
| 116 | 9 | |
| 250 | 9 | |
| 178 | 9 | |
| 272 | 8 | 0.1200 |
| 175 | 8 | 0.0086 |
| 175 | 10 | 0.0140 |
| 97 | 9 | 0.0140 |
| 111 | 8 | |
| 113 | 9 | |
| 113 | 10 | |
| 171 | 8 | |
| 148 | 10 | |
| 148 | 11 | |
| 129 | 8 | |
| 37 | 9 | |
| 194 | 8 | |
| 194 | 9 | |
| 194 | 10 | |
| 194 | 11 | |
| 260 | 10 | |
| 96 | 10 | 0.0016 |
| 70 | 8 | |
| 70 | 10 | 0.0150 |
| 70 | 11 | 0.0280 |
| 43 | 8 | |
| 72 | 8 | |
| 72 | 9 | |
| 237 | 9 | |
| 237 | 10 | |
| 237 | 11 | |
| 138 | 9 | |
| 138 | 10 | |
| 300 | 10 | 0.0003 |
| 282 | 10 | 0.1600 |
| 290 | 10 | |
| 73 | 8 | |
| 238 | 8 | 0.0005 |
| 238 | 9 | 0.0006 |
| 238 | 10 | |
| 230 | 10 | 0.0004 |
| 149 | 9 | |
| 149 | 10 | |
| 286 | 8 | |
| 139 | 8 | |
| 139 | 9 | |
| 195 | 8 | −0.0004 |
| 195 | 9 | 0.2300 |
| 195 | 10 | 0.0580 |
| 179 | 8 | |
| 179 | 11 | |
| 130 | 11 | |
| 166 | 10 | |
| 166 | 11 | |
| 169 | 8 | |
| 169 | 9 | |
| 169 | 10 | |
| 176 | 9 | |
| 176 | 11 | |
| 157 | 8 | |
| 283 | 9 | |
| 283 | 11 | |

[0494] TABLE X B
Mage 3 A24 Supermotif Peptides with Binding Data

| | No. of | |
|---|---|---|
| Position | Amino Acids | A*2401 |
| 108 | 9 | |
| 277 | 11 | |
| 179 | 8 | |
| 179 | 11 | |
| 181 | 9 | |
| 181 | 10 | |
| 268 | 11 | 0.0004 |
| 100 | 10 | |
| 270 | 9 | 0.0006 |
| 165 | 8 | |
| 165 | 11 | |
| 224 | 8 | |
| 115 | 8 | |
| 115 | 10 | |
| 134 | 10 | 0.0017 |
| 280 | 8 | |
| 280 | 11 | |
| 168 | 8 | |
| 168 | 9 | |
| 168 | 10 | |
| 168 | 11 | |
| 229 | 10 | |
| 229 | 11 | |
| 271 | 8 | |
| 250 | 9 | |
| 163 | 10 | |
| 15 | 9 | |
| 15 | 11 | |
| 188 | 8 | |
| 188 | 9 | |
| 200 | 9 | |
| 200 | 10 | |
| 183 | 8 | |
| 249 | 8 | −0.0004 |
| 249 | 10 | |
| 298 | 10 | |
| 174 | 9 | |
| 174 | 11 | |
| 289 | 11 | |
| 177 | 8 | 0.0120 |
| 177 | 10 | |
| 150 | 9 | 0.0160 |
| 150 | 11 | 0.0910 |
| 238 | 8 | |
| 238 | 9 | |
| 195 | 8 | |
| 195 | 9 | 0.4200 |
| 195 | 10 | 0.0500 |
| 221 | 8 | −0.0004 |
| 221 | 11 | 0.0260 |
| 292 | 8 | |
| 292 | 10 | |
| 220 | 9 | |
| 112 | 8 | |
| 112 | 9 | |
| 112 | 10 | |
| 112 | 11 | |
| 285 | 9 | |
| 202 | 8 | |
| 189 | 8 | |
| 201 | 8 | |
| 201 | 9 | |
| 245 | 11 | |
| 166 | 10 | |
| 166 | 11 | |
| 246 | 10 | |
| 246 | 11 | |
| 278 | 10 | |
| 160 | 8 | |
| 116 | 9 | |
| 175 | 8 | 0.0140 |
| 175 | 10 | 0.0480 |
| 135 | 9 | |
| 135 | 11 | |
| 290 | 10 | |
| 142 | 9 | 0.5300 |
| 142 | 10 | 0.0170 |
| 76 | 9 | 0.0270 |
| 171 | 8 | |
| 72 | 8 | |
| 72 | 9 | |
| 148 | 11 | |
| 129 | 8 | |
| 194 | 8 | |
| 194 | 9 | |
| 194 | 10 | |
| 194 | 11 | |
| 159 | 8 | |
| 159 | 9 | |
| 260 | 10 | |
| 144 | 8 | 0.1200 |
| 237 | 9 | |
| 237 | 10 | |
| 70 | 8 | |
| 70 | 10 | |
| 70 | 11 | |
| 157 | 8 | |
| 157 | 10 | |
| 157 | 11 | |
| 96 | 10 | |
| 43 | 8 | |
| 138 | 8 | |
| 138 | 9 | |
| 138 | 10 | |
| 185 | 11 | 0.0026 |
| 300 | 8 | 0.0420 |
| 300 | 10 | 0.5900 |
| 282 | 9 | |
| 97 | 9 | 0.0049 |
| 74 | 11 | |
| 73 | 8 | |
| 230 | 9 | −0.0004 |
| 230 | 10 | −0.0005 |
| 149 | 10 | |
| 286 | 8 | |
| 139 | 8 | |
| 139 | 9 | |
| 176 | 9 | |
| 176 | 11 | |
| 283 | 8 | |
| 283 | 11 | |

[0495] TABLE XI A
Mage 2 B07 Supermotif Peptides with Binding Data

| | No. of | |
|---|---|---|
| Position | Amino Acids | B*0702 |
| 30 | 10 | 0.0002 |
| 216 | 10 | 0.0001 |
| 265 | 8 | −0.0002 |
| 265 | 9 | 0.0001 |
| 296 | 9 | 0.1100 |
| 128 | 8 | 0.0010 |
| 128 | 9 | 0.0001 |
| 98 | 8 | −0.0002 |
| 98 | 10 | 0.0002 |
| 98 | 11 | −0.0001 |
| 147 | 8 | 0.0003 |
| 147 | 11 | 0.0004 |
| 274 | 10 | 0.0008 |
| 274 | 11 | 0.1300 |
| 94 | 8 | 0.0063 |
| 241 | 10 | 0.0400 |
| 241 | 11 | 0.0042 |
| 11 | 8 | −0.0002 |
| 196 | 8 | 0.0190 |
| 196 | 9 | 0.0020 |
| 196 | 10 | 0.0003 |
| 196 | 11 | 0.0099 |
| 61 | 8 | −0.0002 |
| 61 | 11 | −0.0003 |
| 302 | 8 | 0.0026 |
| 60 | 9 | 0.0001 |
| 64 | 8 | 0.0007 |
| 58 | 11 | 0.0006 |
| 261 | 9 | 0.0001 |
| 261 | 11 | −0.0001 |
| 170 | 8 | 0.0170 |
| 170 | 9 | 0.2500 |
| 170 | 10 | 0.0027 |
| 301 | 8 | −0.0002 |
| 301 | 9 | 0.2700 |

[0496] TABLE XI B
Mage 3 B07 Supermotif Peptides with Binding Data

| | No. of | |
|---|---|---|
| Position | Amino Acids | B*0702 |
| 30 | 9 | 0.0001 |
| 30 | 10 | 0.0002 |
| 216 | 10 | 0.0001 |
| 265 | 8 | −0.0002 |
| 265 | 9 | 0.0001 |
| 170 | 8 | −0.0002 |
| 170 | 9 | 0.0001 |
| 170 | 10 | 0.0002 |
| 241 | 10 | 0.0001 |
| 241 | 11 | −0.0004 |
| 60 | 9 | 0.0001 |
| 128 | 8 | 0.0010 |
| 128 | 9 | 0.0001 |
| 98 | 8 | −0.0002 |
| 98 | 10 | 0.0002 |
| 98 | 11 | −0.0001 |
| 147 | 8 | 0.0003 |
| 296 | 9 | 0.8800 |
| 274 | 10 | 0.0002 |
| 274 | 11 | 0.1900 |
| 94 | 8 | −0.0002 |
| 11 | 8 | −0.0002 |
| 71 | 9 | 0.0770 |
| 71 | 10 | 0.0001 |
| 196 | 8 | 0.1300 |
| 196 | 9 | 0.0170 |
| 196 | 10 | 0.0031 |
| 196 | 11 | 0.0280 |
| 302 | 8 | −0.0002 |
| 61 | 8 | −0.0002 |
| 61 | 11 | 0.0049 |
| 58 | 11 | −0.0001 |
| 64 | 8 | 0.0081 |
| 261 | 9 | 0.0001 |
| 261 | 11 | −0.0001 |
| 77 | 8 | −0.0002 |
| 301 | 8 | −0.0002 |
| 301 | 9 | 0.0027 |

[0497] TABLE XII A
Mage 2 B27 Supermotif Peptides

| | No. of |
|---|---|
| Position | Amino Acids |
| 240 | 8 |
| 240 | 11 |
| 126 | 10 |
| 126 | 11 |
| 18 | 8 |
| 219 | 9 |
| 219 | 10 |
| 291 | 9 |
| 291 | 11 |
| 140 | 8 |
| 140 | 11 |
| 297 | 8 |
| 62 | 10 |
| 197 | 8 |
| 197 | 10 |
| 275 | 9 |
| 242 | 9 |
| 95 | 11 |
| 8 | 9 |
| 243 | 8 |
| 111 | 9 |
| 111 | 10 |
| 111 | 11 |
| 173 | 10 |
| 152 | 9 |
| 152 | 11 |
| 110 | 10 |
| 110 | 11 |
| 131 | 10 |
| 117 | 8 |
| 284 | 8 |
| 284 | 10 |

[0498] TABLE XII B
Mage 3 B27 Supermotif Peptides

| | No. of |
|---|---|
| Position | Amino Acids |
| 126 | 10 |
| 126 | 11 |
| 18 | 8 |
| 219 | 10 |
| 173 | 10 |
| 243 | 8 |
| 297 | 8 |
| 297 | 11 |
| 197 | 8 |
| 197 | 10 |
| 242 | 9 |
| 275 | 9 |
| 8 | 9 |
| 248 | 8 |
| 248 | 9 |
| 248 | 11 |
| 111 | 9 |
| 111 | 10 |
| 111 | 11 |
| 152 | 9 |
| 152 | 11 |
| 110 | 10 |
| 110 | 11 |
| 117 | 8 |
| 291 | 9 |
| 291 | 11 |
| 284 | 10 |

[0499] TABLE XIII A
Mage 2 B58 Supermotif Peptides

| | No. of |
|---|---|
| Position | Amino Acids |
| 107 | 8 |
| 107 | 10 |
| 107 | 11 |
| 154 | 8 |
| 154 | 9 |
| 154 | 11 |
| 68 | 8 |
| 68 | 10 |
| 39 | 8 |
| 39 | 10 |
| 215 | 8 |
| 215 | 11 |
| 236 | 10 |
| 236 | 11 |
| 17 | 9 |
| 17 | 10 |
| 102 | 8 |
| 137 | 10 |
| 137 | 11 |
| 280 | 8 |
| 239 | 8 |
| 239 | 9 |
| 151 | 8 |
| 151 | 10 |
| 151 | 11 |
| 71 | 9 |
| 71 | 10 |
| 67 | 9 |
| 67 | 11 |
| 263 | 9 |
| 263 | 10 |
| 263 | 11 |
| 63 | 9 |
| 289 | 11 |
| 172 | 8 |
| 172 | 11 |
| 109 | 8 |
| 109 | 9 |
| 109 | 11 |
| 299 | 11 |
| 132 | 8 |
| 132 | 9 |
| 153 | 8 |
| 153 | 9 |
| 153 | 10 |
| 198 | 8 |
| 198 | 9 |
| 198 | 11 |
| 266 | 8 |
| 106 | 8 |
| 106 | 9 |
| 106 | 11 |
| 37 | 9 |
| 37 | 10 |
| 276 | 8 |
| 276 | 9 |
| 276 | 11 |
| 125 | 11 |
| 6 | 11 |
| 69 | 9 |
| 69 | 11 |
| 87 | 11 |
| 40 | 9 |
| 40 | 11 |
| 41 | 8 |
| 41 | 10 |
| 42 | 9 |
| 43 | 8 |
| 43 | 11 |
| 72 | 8 |
| 72 | 9 |
| 38 | 8 |
| 38 | 9 |
| 38 | 11 |
| 281 | 11 |
| 73 | 8 |
| 179 | 8 |
| 179 | 11 |
| 130 | 10 |
| 130 | 11 |

[0500] TABLE XIII B
Mage 3 B58 Supermotif Peptides

| | No. of |
|---|---|
| Position | Amino Acids |
| 107 | 10 |
| 107 | 11 |
| 38 | 8 |
| 38 | 9 |
| 38 | 11 |
| 68 | 8 |
| 68 | 10 |
| 154 | 8 |
| 154 | 9 |
| 154 | 11 |
| 39 | 8 |
| 39 | 10 |
| 179 | 8 |
| 179 | 11 |
| 215 | 8 |
| 215 | 11 |
| 236 | 10 |
| 236 | 11 |
| 37 | 9 |
| 37 | 10 |
| 17 | 9 |
| 17 | 10 |
| 102 | 8 |
| 280 | 8 |
| 280 | 11 |
| 178 | 9 |
| 151 | 8 |
| 151 | 10 |
| 151 | 11 |
| 67 | 9 |
| 67 | 11 |
| 263 | 9 |
| 263 | 10 |
| 263 | 11 |
| 137 | 9 |
| 137 | 10 |
| 137 | 11 |
| 293 | 9 |
| 299 | 9 |
| 299 | 10 |
| 299 | 11 |
| 132 | 8 |
| 132 | 9 |
| 198 | 8 |
| 198 | 9 |
| 198 | 11 |
| 153 | 8 |
| 153 | 9 |
| 153 | 10 |
| 109 | 8 |
| 109 | 9 |
| 109 | 11 |
| 246 | 10 |
| 246 | 11 |
| 266 | 8 |
| 95 | 11 |
| 72 | 8 |
| 72 | 9 |
| 106 | 8 |
| 106 | 11 |
| 63 | 9 |
| 276 | 8 |
| 276 | 9 |
| 276 | 11 |
| 125 | 11 |
| 6 | 11 |
| 69 | 9 |
| 69 | 11 |
| 156 | 9 |
| 156 | 11 |
| 155 | 8 |
| 155 | 10 |
| 40 | 9 |
| 40 | 11 |
| 41 | 8 |
| 41 | 10 |
| 42 | 9 |
| 96 | 10 |
| 43 | 8 |
| 43 | 11 |
| 281 | 10 |
| 281 | 11 |
| 73 | 8 |
| 113 | 8 |
| 113 | 9 |
| 113 | 10 |
| 130 | 10 |
| 130 | 11 |

[0501] TABLE XIV A
Mage 2 B62 Supermotif Peptides

| | No.of |
|---|---|
| Position | Amino Acids |
| 108 | 10 |
| 277 | 8 |
| 277 | 10 |
| 143 | 8 |
| 143 | 9 |
| 100 | 10 |
| 249 | 10 |
| 265 | 9 |
| 224 | 8 |
| 115 | 10 |
| 128 | 8 |
| 229 | 10 |
| 229 | 11 |
| 165 | 8 |
| 168 | 9 |
| 168 | 10 |
| 271 | 9 |
| 98 | 8 |
| 147 | 11 |
| 105 | 9 |
| 105 | 10 |
| 163 | 8 |
| 163 | 10 |
| 188 | 8 |
| 188 | 9 |
| 200 | 9 |
| 200 | 10 |
| 274 | 10 |
| 274 | 11 |
| 241 | 11 |
| 203 | 9 |
| 177 | 10 |
| 204 | 8 |
| 292 | 8 |
| 292 | 10 |
| 220 | 8 |
| 220 | 11 |
| 244 | 8 |
| 112 | 8 |
| 285 | 9 |
| 278 | 9 |
| 202 | 8 |
| 202 | 10 |
| 189 | 8 |
| 201 | 8 |
| 201 | 9 |
| 201 | 11 |
| 121 | 10 |
| 120 | 11 |
| 245 | 11 |
| 246 | 10 |
| 158 | 9 |
| 158 | 10 |
| 45 | 9 |
| 160 | 8 |
| 160 | 10 |
| 160 | 11 |
| 116 | 9 |
| 250 | 9 |
| 178 | 9 |
| 196 | 8 |
| 196 | 9 |
| 196 | 10 |
| 247 | 9 |
| 89 | 9 |
| 89 | 10 |
| 193 | 11 |
| 171 | 9 |
| 61 | 11 |
| 65 | 11 |
| 148 | 10 |
| 129 | 11 |
| 159 | 8 |
| 159 | 9 |
| 159 | 11 |
| 36 | 11 |
| 194 | 10 |
| 194 | 11 |
| 260 | 10 |
| 96 | 10 |
| 259 | 11 |
| 64 | 8 |
| 237 | 11 |
| 138 | 9 |
| 138 | 10 |
| 290 | 10 |
| 44 | 10 |
| 149 | 9 |
| 286 | 8 |
| 139 | 8 |
| 139 | 9 |
| 139 | 11 |
| 195 | 9 |
| 195 | 10 |
| 195 | 11 |
| 261 | 9 |
| 261 | 11 |
| 170 | 8 |
| 170 | 10 |
| 251 | 8 |
| 251 | 11 |
| 166 | 11 |
| 169 | 8 |
| 169 | 9 |
| 169 | 11 |
| 176 | 11 |
| 157 | 8 |
| 157 | 10 |
| 157 | 11 |
| 283 | 11 |

[0502] TABLE XIV B
Mage 3 B62 Supermotif Peptides

| | No. of |
|---|---|
| Position | Amino Acids |
| 108 | 10 |
| 277 | 8 |
| 277 | 10 |
| 265 | 9 |
| 170 | 8 |
| 170 | 9 |
| 241 | 10 |
| 241 | 11 |
| 165 | 8 |
| 224 | 8 |
| 115 | 10 |
| 134 | 10 |
| 128 | 8 |
| 168 | 9 |
| 168 | 10 |
| 168 | 11 |
| 229 | 10 |
| 271 | 9 |
| 98 | 8 |
| 105 | 9 |
| 250 | 9 |
| 163 | 10 |
| 188 | 8 |
| 188 | 9 |
| 200 | 9 |
| 200 | 10 |
| 274 | 10 |
| 274 | 11 |
| 298 | 10 |
| 298 | 11 |
| 289 | 11 |
| 195 | 9 |
| 195 | 10 |
| 195 | 11 |
| 292 | 8 |
| 292 | 10 |
| 220 | 8 |
| 220 | 11 |
| 244 | 8 |
| 112 | 8 |
| 285 | 9 |
| 202 | 8 |
| 189 | 8 |
| 201 | 8 |
| 201 | 9 |
| 121 | 10 |
| 120 | 11 |
| 245 | 11 |
| 166 | 11 |
| 71 | 10 |
| 158 | 10 |
| 278 | 9 |
| 45 | 9 |
| 160 | 8 |
| 160 | 10 |
| 116 | 9 |
| 135 | 9 |
| 135 | 11 |
| 196 | 8 |
| 196 | 9 |
| 196 | 10 |
| 290 | 10 |
| 89 | 10 |
| 193 | 11 |
| 171 | 8 |
| 65 | 11 |
| 129 | 11 |
| 194 | 10 |
| 194 | 11 |
| 159 | 9 |
| 159 | 11 |
| 260 | 10 |
| 259 | 11 |
| 70 | 8 |
| 70 | 11 |
| 157 | 8 |
| 157 | 11 |
| 138 | 8 |
| 138 | 9 |
| 138 | 10 |
| 44 | 10 |
| 74 | 11 |
| 247 | 9 |
| 286 | 8 |
| 261 | 9 |
| 261 | 11 |
| 251 | 8 |
| 251 | 11 |
| 139 | 8 |
| 139 | 9 |
| 139 | 11 |
| 143 | 8 |
| 143 | 9 |
| 176 | 11 |
| 77 | 8 |
| 301 | 8 |
| 283 | 8 |
| 283 | 9 |
| 283 | 11 |

[0503] TABLE XV A
Mage 2 A01 Motif Peptides with Binding Data

| | No. of | |
|---|---|---|
| Position | Amino Acids | A*0101 |
| 68 | 10 | 0.1700 |
| 67 | 11 | 0.0047 |
| 294 | 8 | −0.0021 |
| 150 | 8 | 0.0023 |
| 246 | 10 | 0.0450 |
| 247 | 9 | 1.5000 |
| 262 | 8 | −0.0021 |
| 275 | 9 | −0.0006 |
| 70 | 8 | −0.0021 |
| 69 | 9 | 0.0430 |
| 251 | 8 | −0.0021 |
| 179 | 8 | |
| 166 | 11 | 0.2000 |

[0504] TABLE XV B
Mage 3 A01 Motif Peptides with Binding Data

| | No. of | |
|---|---|---|
| Position | Amino Acids | A*0101 |
| 68 | 10 | 2.6000 |
| 179 | 8 | 0.1100 |
| 168 | 9 | 18.0000 |
| 67 | 11 | 0.0390 |
| 137 | 9 | 0.0500 |
| 177 | 10 | 0.0020 |
| 293 | 9 | 0.0370 |
| 292 | 10 | 0.0011 |
| 136 | 10 | 0.0020 |
| 166 | 11 | 7.5000 |
| 246 | 10 | 0.2600 |
| 262 | 8 | −0.0021 |
| 275 | 9 | 0.0011 |
| 69 | 9 | 0.0550 |
| 74 | 11 | 0.0830 |
| 251 | 8 | −0.0021 |

[0505] TABLE XVI A
Mage 2 A03 Motif Peptidies with Binding Data

| | No. of | |
|---|---|---|
| Position | Amino Acids | A*0301 |
| 55 | 9 | 0.0003 |
| 267 | 10 | 0.0032 |
| 267 | 11 | |
| 56 | 8 | |
| 210 | 11 | 0.0009 |
| 207 | 10 | |
| 108 | 11 | |
| 22 | 9 | 0.0003 |
| 22 | 11 | |
| 277 | 9 | 0.0810 |
| 154 | 9 | 0.0002 |
| 68 | 10 | 0.0009 |
| 32 | 8 | |
| 145 | 9 | 0.0002 |
| 145 | 10 | |
| 100 | 8 | |
| 100 | 9 | |
| 249 | 10 | |
| 249 | 11 | 0.0047 |
| 236 | 8 | −0.0004 |
| 236 | 9 | 0.0021 |
| 21 | 8 | |
| 21 | 10 | 0.0003 |
| 235 | 9 | |
| 235 | 10 | |
| 270 | 8 | |
| 104 | 8 | |
| 104 | 9 | 0.0002 |
| 212 | 9 | 0.0002 |
| 14 | 9 | 0.0003 |
| 232 | 8 | |
| 232 | 9 | |
| 232 | 10 | |
| 224 | 8 | |
| 224 | 11 | 0.0016 |
| 115 | 9 | 0.0045 |
| 115 | 10 | 0.0066 |
| 115 | 11 | 0.0011 |
| 134 | 8 | −0.0009 |
| 102 | 10 | 0.0002 |
| 102 | 11 | 0.0010 |
| 137 | 10 | 0.0002 |
| 137 | 11 | |
| 280 | 9 | |
| 280 | 10 | |
| 229 | 11 | |
| 47 | 9 | 0.0003 |
| 47 | 10 | 0.0003 |
| 165 | 10 | 0.0002 |
| 168 | 9 | 0.0002 |
| 146 | 8 | |
| 146 | 9 | 0.0003 |
| 119 | 8 | |
| 119 | 9 | |
| 71 | 11 | 0.0110 |
| 67 | 11 | |
| 213 | 8 | |
| 191 | 8 | |
| 294 | 8 | |
| 15 | 8 | |
| 188 | 11 | 0.0780 |
| 200 | 8 | |
| 200 | 11 | |
| 24 | 9 | 0.0003 |
| 263 | 9 | |
| 86 | 11 | −0.0002 |
| 9 | 10 | 0.0003 |
| 9 | 11 | |
| 118 | 8 | |
| 118 | 9 | 0.0016 |
| 118 | 16 | 0.0014 |
| 298 | 8 | |
| 298 | 10 | 0.0074 |
| 298 | 11 | |
| 63 | 9 | 0.0002 |
| 289 | 10 | |
| 209 | 8 | |
| 150 | 8 | |
| 293 | 9 | |
| 208 | 9 | |
| 203 | 8 | |
| 177 | 10 | 0.0036 |
| 109 | 10 | 0.0002 |
| 109 | 11 | |
| 299 | 9 | 0.0340 |
| 299 | 10 | |
| 132 | 10 | 0.0002 |
| 153 | 10 | 0.0002 |
| 292 | 10 | |
| 112 | 8 | |
| 198 | 10 | |
| 285 | 8 | 0.0053 |
| 206 | 11 | |
| 190 | 9 | 0.0002 |
| 23 | 8 | |
| 23 | 10 | 0.0003 |
| 278 | 8 | −0.0004 |
| 278 | 11 | |
| 201 | 9 | |
| 189 | 10 | 0.0093 |
| 201 | 10 | |
| 120 | 8 | −0.0009 |
| 245 | 11 | |
| 246 | 10 | |
| 225 | 10 | −0.0004 |
| 45 | 11 | |
| 25 | 8 | |
| 116 | 8 | 0.0290 |
| 116 | 9 | 0.0430 |
| 116 | 10 | 0.0260 |
| 116 | 11 | |
| 250 | 9 | |
| 250 | 10 | 0.0027 |
| 178 | 9 | |
| 97 | 9 | 0.0002 |
| 97 | 11 | |
| 227 | 8 | −0.0009 |
| 113 | 11 | 0.0200 |
| 142 | 10 | 0.0002 |
| 54 | 10 | |
| 266 | 11 | −0.0009 |
| 31 | 9 | |
| 99 | 9 | 0.0003 |
| 99 | 10 | 0.0003 |
| 262 | 8 | |
| 262 | 10 | |
| 2 | 8 | |
| 2 | 10 | 0.0003 |
| 303 | 8 | −0.0009 |
| 59 | 10 | |
| 148 | 10 | 0.0160 |
| 29 | 11 | |
| 144 | 8 | |
| 144 | 10 | 0.0002 |
| 144 | 11 | |
| 248 | 8 | |
| 248 | 11 | |
| 260 | 8 | |
| 260 | 10 | |
| 276 | 8 | |
| 276 | 10 | 0.0200 |
| 125 | 8 | −0.0009 |
| 125 | 9 | |
| 19 | 10 | 0.0003 |
| 96 | 10 | 0.0002 |
| 264 | 8 | |
| 70 | 8 | |
| 226 | 9 | 0.0020 |
| 69 | 9 | |
| 87 | 10 | 0.0002 |
| 72 | 10 | 0.0014 |
| 237 | 8 | 0.1410 |
| 138 | 9 | 0.0002 |
| 138 | 10 | 0.0002 |
| 199 | 9 | |
| 74 | 8 | 0.0140 |
| 49 | 8 | |
| 290 | 9 | |
| 281 | 8 | |
| 281 | 9 | 0.5900 |
| 73 | 9 | 0.0890 |
| 230 | 10 | |
| 230 | 11 | |
| 149 | 9 | 0.0810 |
| 139 | 8 | |
| 139 | 9 | 0.0002 |
| 179 | 8 | |
| 48 | 8 | |
| 48 | 9 | 0.0003 |
| 166 | 9 | 0.0007 |
| 166 | 11 | |
| 169 | 8 | |
| 273 | 11 | |
| 176 | 11 | |
| 283 | 10 | 0.0033 |

[0506] TABLE XVI B
Mage 3 A03 Motif Peptides with Binding Data

| | No. of | |
|---|---|---|
| Position | Amino Acids | A*0301 |
| 107 | 8 | |
| 267 | 10 | 0.0032 |
| 267 | 11 | |
| 199 | 9 | 0.0006 |
| 207 | 10 | |
| 22 | 9 | 0.0003 |
| 22 | 11 | |
| 108 | 11 | |
| 277 | 9 | 0.0270 |
| 68 | 10 | 0.0009 |
| 154 | 9 | 0.0011 |
| 179 | 8 | |
| 32 | 8 | |
| 100 | 8 | |
| 100 | 9 | |
| 236 | 8 | −0.0004 |
| 236 | 9 | −0.0003 |
| 21 | 8 | |
| 21 | 10 | 0.0003 |
| 235 | 9 | 0.0003 |
| 235 | 10 | 0.0003 |
| 270 | 8 | |
| 104 | 8 | |
| 104 | 9 | 0.0002 |
| 104 | 11 | |
| 212 | 9 | 0.0002 |
| 14 | 9 | 0.0003 |
| 165 | 10 | 0.0003 |
| 224 | 8 | |
| 224 | 11 | −0.0009 |
| 115 | 9 | 0.0045 |
| 115 | 10 | 0.0066 |
| 115 | 11 | 0.0011 |
| 102 | 10 | 0.0002 |
| 102 | 11 | 0.0002 |
| 280 | 9 | |
| 280 | 10 | |
| 168 | 9 | 0.0002 |
| 168 | 11 | |
| 47 | 9 | 0.0003 |
| 47 | 10 | 0.0003 |
| 178 | 9 | 0.0003 |
| 146 | 8 | |
| 146 | 9 | 0.0003 |
| 119 | 8 | |
| 119 | 9 | |
| 250 | 9 | |
| 250 | 10 | 0.0009 |
| 67 | 11 | |
| 213 | 8 | |
| 191 | 8 | |
| 191 | 9 | 0.0003 |
| 240 | 10 | 0.0003 |
| 240 | 11 | |
| 295 | 11 | |
| 15 | 8 | |
| 188 | 11 | 0.1300 |
| 200 | 8 | |
| 200 | 11 | |
| 24 | 9 | 0.0003 |
| 263 | 9 | |
| 137 | 9 | |
| 137 | 10 | 0.0020 |
| 137 | 11 | |
| 9 | 10 | 0.0003 |
| 9 | 11 | |
| 118 | 8 | |
| 118 | 9 | 0.0016 |
| 118 | 10 | 0.0014 |
| 249 | 10 | |
| 249 | 11 | |
| 298 | 8 | |
| 289 | 10 | |
| 209 | 8 | |
| 177 | 10 | 0.0005 |
| 172 | 8 | |
| 208 | 9 | |
| 203 | 8 | |
| 203 | 9 | 0.0069 |
| 293 | 9 | 0.0003 |
| 204 | 8 | 0.0053 |
| 198 | 10 | |
| 153 | 10 | 0.0003 |
| 292 | 10 | |
| 112 | 8 | |
| 285 | 8 | 0.0580 |
| 206 | 11 | |
| 190 | 9 | |
| 190 | 10 | 0.0003 |
| 239 | 11 | |
| 23 | 8 | |
| 23 | 10 | 0.0003 |
| 136 | 10 | 0.0003 |
| 136 | 11 | |
| 202 | 9 | |
| 202 | 10 | 0.0280 |
| 189 | 10 | 0.0200 |
| 189 | 11 | |
| 201 | 10 | |
| 201 | 11 | 0.0021 |
| 120 | 8 | −0.0009 |
| 245 | 11 | |
| 166 | 9 | 0.0002 |
| 166 | 11 | |
| 109 | 10 | 0.0002 |
| 109 | 11 | |
| 225 | 10 | −0.0006 |
| 246 | 10 | 0.0003 |
| 278 | 8 | −0.0004 |
| 278 | 11 | |
| 45 | 11 | |
| 25 | 8 | |
| 116 | 8 | 0.0290 |
| 116 | 9 | 0.0430 |
| 116 | 10 | 0.0260 |
| 116 | 11 | |
| 135 | 11 | |
| 290 | 9 | 0.0003 |
| 266 | 11 | −0.0009 |
| 31 | 8 | |
| 31 | 9 | 0.0003 |
| 99 | 9 | 0.0003 |
| 99 | 10 | 0.0003 |
| 59 | 10 | 0.0003 |
| 262 | 8 | |
| 262 | 10 | |
| 171 | 8 | |
| 171 | 9 | |
| 2 | 8 | |
| 2 | 10 | 0.0003 |
| 303 | 8 | −0.0009 |
| 95 | 11 | |
| 106 | 9 | |
| 29 | 10 | 0.0003 |
| 29 | 11 | |
| 260 | 8 | |
| 260 | 10 | |
| 276 | 8 | |
| 276 | 10 | 0.0190 |
| 125 | 8 | −0.0009 |
| 125 | 9 | |
| 19 | 10 | 0.0003 |
| 264 | 8 | |
| 294 | 8 | |
| 237 | 8 | −0.0009 |
| 70 | 8 | |
| 69 | 9 | |
| 155 | 8 | |
| 96 | 10 | 0.0002 |
| 226 | 9 | 0.0003 |
| 138 | 8 | |
| 138 | 9 | 0.0002 |
| 138 | 10 | 0.0085 |
| 97 | 9 | 0.0002 |
| 97 | 11 | |
| 49 | 8 | |
| 74 | 11 | |
| 281 | 8 | |
| 281 | 9 | 0.5900 |
| 113 | 11 | −0.0002 |
| 169 | 8 | |
| 169 | 10 | 0.0003 |
| 169 | 11 | |
| 140 | 8 | |
| 227 | 8 | 0.0016 |
| 48 | 8 | |
| 48 | 9 | 0.0003 |
| 139 | 8 | |
| 139 | 9 | 0.0022 |
| 273 | 11 | |
| 145 | 9 | 0.0020 |
| 145 | 10 | 0.0003 |
| 176 | 11 | |
| 283 | 10 | 0.0020 |

[0507] TABLE XVII A
Mage 2 A11 Motif Peptides with Binding Data

| | No. of | |
|---|---|---|
| Position | Amino Acids | A*1101 |
| 55 | 9 | 0.0009 |
| 267 | 10 | 0.0035 |
| 56 | 8 | |
| 210 | 11 | 0.0007 |
| 108 | 11 | |
| 277 | 9 | 0.1900 |
| 68 | 10 | 0.0260 |
| 145 | 9 | 0.0022 |
| 249 | 10 | |
| 249 | 11 | 0.0018 |
| 236 | 8 | 0.0005 |
| 236 | 9 | 0.0025 |
| 235 | 9 | |
| 235 | 10 | |
| 104 | 8 | |
| 104 | 9 | 0.0002 |
| 212 | 9 | 0.0001 |
| 232 | 10 | |
| 224 | 11 | 0.0008 |
| 115 | 9 | 0.0011 |
| 115 | 10 | 0.0003 |
| 115 | 11 | 0.0031 |
| 134 | 8 | −0.0003 |
| 102 | 10 | 0.0002 |
| 102 | 11 | 0.0004 |
| 280 | 9 | |
| 280 | 10 | |
| 165 | 10 | 0.0002 |
| 168 | 9 | 0.0002 |
| 146 | 8 | |
| 119 | 9 | |
| 71 | 11 | 0.0170 |
| 67 | 11 | |
| 213 | 8 | |
| 191 | 8 | |
| 294 | 8 | |
| 188 | 11 | 0.0047 |
| 86 | 11 | −0.0002 |
| 9 | 11 | |
| 118 | 8 | |
| 118 | 10 | 0.0002 |
| 298 | 8 | |
| 298 | 10 | 0.0018 |
| 289 | 10 | |
| 150 | 8 | |
| 293 | 9 | |
| 177 | 10 | 0.0002 |
| 109 | 10 | 0.0002 |
| 299 | 9 | 0.0280 |
| 132 | 10 | 0.0009 |
| 292 | 10 | |
| 285 | 8 | 0.0100 |
| 190 | 9 | 0.0061 |
| 278 | 8 | 0.0027 |
| 278 | 11 | |
| 189 | 10 | 0.0014 |
| 120 | 8 | −0.0004 |
| 245 | 11 | |
| 246 | 10 | |
| 225 | 10 | 0.0001 |
| 116 | 8 | 0.1500 |
| 116 | 9 | 0.0100 |
| 116 | 10 | 0.0022 |
| 250 | 9 | |
| 250 | 10 | 0.0089 |
| 178 | 9 | |
| 227 | 8 | −0.0004 |
| 113 | 11 | 0.0120 |
| 54 | 10 | |
| 266 | 11 | −0.0002 |
| 262 | 8 | |
| 2 | 8 | |
| 2 | 10 | 0.0002 |
| 303 | 8 | −0.0004 |
| 148 | 10 | 0.0033 |
| 144 | 10 | 0.0083 |
| 248 | 8 | |
| 248 | 11 | |
| 260 | 10 | |
| 276 | 8 | |
| 276 | 10 | 0.0750 |
| 125 | 8 | −0.0003 |
| 70 | 8 | |
| 226 | 9 | 0.0220 |
| 88 | 9 | 0.0001 |
| 69 | 9 | |
| 87 | 10 | 0.0002 |
| 72 | 10 | 0.0910 |
| 237 | 8 | 0.0810 |
| 74 | 8 | 0.0550 |
| 290 | 9 | |
| 281 | 8 | |
| 281 | 9 | 0.0066 |
| 73 | 9 | 1.1000 |
| 149 | 9 | 0.0330 |
| 179 | 8 | |
| 166 | 9 | 0.0100 |
| 166 | 11 | |
| 169 | 8 | |
| 273 | 11 | |
| 176 | 11 | |
| 283 | 10 | 0.0160 |

[0508] TABLE XVII B
Mage 3 A11 Motif Peptides with Binding Data

| | No. of | |
|---|---|---|
| Position | Amino Acids | A*1101 |
| 267 | 10 | 0.0035 |
| 108 | 11 | |
| 277 | 9 | 0.1700 |
| 68 | 10 | 0.0330 |
| 179 | 8 | |
| 236 | 8 | −0.0003 |
| 236 | 9 | −0.0002 |
| 235 | 9 | 0.0002 |
| 235 | 10 | 0.0002 |
| 104 | 8 | |
| 104 | 9 | 0.0001 |
| 212 | 9 | 0.0001 |
| 165 | 10 | 0.0002 |
| 224 | 11 | 0.0023 |
| 115 | 9 | 0.0011 |
| 115 | 10 | 0.0003 |
| 115 | 11 | 0.0031 |
| 102 | 10 | 0.0002 |
| 102 | 11 | 0.0004 |
| 280 | 9 | |
| 280 | 10 | |
| 168 | 9 | 0.0009 |
| 178 | 9 | 0.0004 |
| 146 | 8 | |
| 119 | 9 | |
| 250 | 9 | |
| 250 | 10 | 0.0012 |
| 67 | 11 | |
| 213 | 8 | |
| 191 | 8 | |
| 240 | 10 | 0.0002 |
| 295 | 11 | |
| 188 | 11 | 0.0570 |
| 137 | 9 | |
| 9 | 11 | |
| 118 | 8 | |
| 118 | 10 | 0.0002 |
| 249 | 10 | |
| 249 | 11 | |
| 298 | 8 | |
| 289 | 10 | |
| 177 | 10 | 0.0004 |
| 203 | 9 | 0.0011 |
| 293 | 9 | 0.0002 |
| 204 | 8 | 0.0037 |
| 292 | 10 | |
| 285 | 8 | 0.0190 |
| 190 | 9 | |
| 239 | 11 | |
| 136 | 10 | 0.0012 |
| 202 | 10 | 0.0021 |
| 189 | 10 | 0.0110 |
| 201 | 11 | 0.0056 |
| 120 | 8 | −0.0004 |
| 245 | 11 | |
| 166 | 9 | 0.0001 |
| 166 | 11 | |
| 109 | 10 | 0.0002 |
| 225 | 10 | 0.0030 |
| 246 | 10 | 0.0002 |
| 278 | 8 | 0.0014 |
| 278 | 11 | |
| 116 | 8 | 0.1500 |
| 116 | 9 | 0.0100 |
| 116 | 10 | 0.0022 |
| 135 | 11 | |
| 75 | 10 | 0.0002 |
| 290 | 9 | 0.0002 |
| 266 | 11 | −0.0002 |
| 262 | 8 | |
| 2 | 8 | |
| 2 | 10 | 0.0002 |
| 303 | 8 | −0.0003 |
| 260 | 10 | |
| 276 | 8 | |
| 276 | 10 | 0.1100 |
| 125 | 8 | −0.0003 |
| 294 | 8 | |
| 237 | 8 | 0.0012 |
| 70 | 8 | |
| 69 | 9 | |
| 226 | 9 | 0.1400 |
| 138 | 8 | |
| 74 | 11 | |
| 281 | 8 | |
| 281 | 9 | 0.0066 |
| 113 | 11 | 0.0011 |
| 169 | 8 | |
| 227 | 8 | 0.0005 |
| 273 | 11 | |
| 145 | 9 | 0.0270 |
| 176 | 11 | |
| 283 | 10 | 0.0061 |

[0509] TABLE XVIII A
Mage 2 A24 Motif Peptides with Binding Data

| | No. of | |
|---|---|---|
| Position | Amino Acids | A [symbol] 2401 |
| 268 | 11 | 0.0004 |
| 270 | 9 | 0.0006 |
| 270 | 10 | 0.0097 |
| 156 | 9 | 3.5000 |
| 150 | 9 | 0.0230 |
| 150 | 11 | 0.0950 |
| 221 | 8 | 0.0007 |
| 221 | 11 | 0.0170 |
| 112 | 8 | 0.0005 |
| 112 | 9 | |
| 112 | 10 | |
| 112 | 11 | |
| 246 | 11 | |
| 272 | 8 | 0.1200 |
| 175 | 8 | 0.0086 |
| 175 | 10 | 0.0140 |
| 97 | 9 | 0.0140 |
| 96 | 10 | 0.0016 |
| 70 | 10 | 0.0150 |
| 70 | 11 | 0.0280 |
| 300 | 10 | 0.0003 |
| 282 | 10 | 0.1600 |
| 238 | 8 | 0.0005 |
| 238 | 9 | 0.0006 |
| 230 | 10 | 0.0004 |
| 195 | 8 | −0.0004 |
| 195 | 9 | 0.2300 |
| 195 | 10 | 0.0580 |

[0510] TABLE XVII B

| | No. of | |
|---|---|---|
| Position | Amino Acids | A [symbol] 2401 |
| 268 | 11 | 0.0004 |
| 270 | 9 | 0.0006 |
| 134 | 10 | 0.0017 |
| 249 | 8 | −0.0004 |
| 289 | 11 | |
| 177 | 8 | 0.0120 |
| 150 | 9 | 0.0160 |
| 150 | 11 | 0.0910 |
| 195 | 8 | |
| 195 | 9 | 0.4200 |
| 195 | 10 | 0.0500 |
| 221 | 8 | −0.0004 |
| 221 | 11 | 0.0260 |
| 166 | 10 | |
| 175 | 8 | 0.0140 |
| 175 | 10 | 0.0480 |
| 142 | 9 | 0.5300 |
| 142 | 10 | 0.0170 |
| 144 | 8 | 0.1200 |
| 185 | 11 | 0.0026 |
| 300 | 8 | 0.0420 |
| 300 | 10 | 0.5900 |
| 97 | 9 | 0.0049 |
| 230 | 9 | −0.0004 |
| 230 | 10 | −0.0005 |

[0511] TABLE XIX A
Mage 2 DR Super Motif Peptides with Binding Data

| Core | Exemplary | | | | | | | | | | SEQ |
|---|---|---|---|---|---|---|---|---|---|---|---|
| Sequence | Sequence | Position | DR1 | DR2wB1 | DR2w2B2 | DR3 | DR4w4 | DR4W15 | DR5w11 | DR5w12 | ID NO. |
| LVGAQAPAT | ALGLVGAQAPATEEQ | 24 | 0.0330 | | | | −0.0032 | | | | 1913 |
| LSYDGLLGD | CLGLSYDGLLGDNQV | 183 | | | | 0.1400 | | | | | 1914 |
| LGDNQVMPK | DGLLGDNQVMPKTGL | 189 | −0.0005 | | | | −0.0032 | | | | 1915 |
| IWEELSMLE | EEKIWEELSMLEVFE | 220 | | | | 0.0130 | | | | | 1916 |
| WGPRALIET | EFLWGPRALIETSYV | 272 | | | | | | | | | 1917 |
| WEELSMLEV | EKIWEELSMLEVFEG | 221 | | | | | | | | | 1918 |
| LEYRQVPGS | ENYLEYRQVPGSDPA | 255 | | | | | | | | | 1919 |
| ISYPPLHER | EPHISYPPLHERALR | 298 | −0.0003 | | | | −0.0032 | | | | 1920 |
| FQAAISRKM | ESEFQAAISHKMVEL | 104 | 1.2000 | 0.0620 | 1.0000 | 0.0113 | 0.1600 | | 0.0270 | | 1921 |
| LGEVPAADS | EVTLGEVPAADSPSP | 49 | | | | | | | | | 1922 |
| VIFSKASEY | FFPVIFSKASEYLQL | 148 | | | | | | | | | 1923 |
| IFSKASEYL | FPLVIFSKASEYLQLV | 149 | | | | | | | | | 1924 |
| LGLVGAQAP | GEALGLVGAQAPATE | 22 | | | | | | | | | 1925 |
| VVEVVMSH | GIEVVEVVPISHLYI | 165 | 0.0084 | 0.0046 | 0.0009 | 0.0036 | 0.0070 | | −0.0005 | | 1926 |
| HVLAHAI | GLLHVLAHAIEGD | 202 | 0.0100 | | | | −0.0032 | | | | 1927 |
| LLKYRAREP | HFLLLKRAREPVTK | 120 | | | | | | | | | 1928 |
| ILVTCLGLS | HILYILVTCLGLSYDG | 176 | | | | | | | | | 1929 |
| VEVVPISHL | IEVVEVVPISHLYIL | 166 | | | | | | | | | 1930 |
| IEGDCAPEE | HAIEGDCAPEEKIW | 210 | | | | 0.0660 | | | | | 1931 |
| LAHAIEGD | HVLAHAIEGDCAP | 205 | | | | | | | | | 1932 |
| LYILVTCLG | ISHLYILVTCLGLSY | 174 | | | | | | | | | 1933 |
| MLESVLRNC | KAEMLESVLRNCQDF | 134 | | | | | | | | | 1934 |
| LLHVLAH | KTGLLHVLAHAIE | 200 | 0.0120 | 0.0037 | −0.0022 | 0.0025 | 0.0370 | | −0.0005 | | 1935 |
| VPAADSPSP | LGEVPAADSPSPPHS | 52 | −0.0005 | | | | −0.0032 | | | | 1936 |
| VGAQAPATE | LGLVGAQAPATEEQQ | 25 | | | | | | | | | 1937 |
| VLAHAIEG | LHVLAHAIEGDCA | 204 | 0.0120 | | | | 0.0051 | | | | 1938 |
| IVLAHAIE | LLHVLAHAIEGDC | 203 | 0.0086 | | | | 0.0120 | | | | 1939 |
| YRAREPVTK | LLKYRAREPVTKAEM | 123 | | | | | | | | | 1940 |
| VFGIEVVEV | LQLVFGIEVVEVVPI | 160 | | | | | | | | | 1941 |
| VTLGEVPAA | LVEVTLGEVPAADSP | 47 | | | | | | | | | 1942 |
| LVHFLLLKY | MVELVHFLLLKYRAR | 115 | | | | | | | | | 1943 |
| MPKTGLLH | NQVMPKTGLLHVLA | 195 | 0.0019 | | | | −0.0032 | | | | 1944 |
| LLMQDLVQE | PRKLLMQDLVQENYL | 244 | | | | | | | | | 1945 |
| FPDLESEFQ | PRMFPDLESEFQAAI | 97 | | | | | | | | | 1946 |
| ISRKMVELV | QAAISRKMVELVHFL | 108 | | | | | | | | | 1947 |
| FPVIFSKAS | QDFFPVIFSKASEYL | 146 | | | | | | | | | 1948 |
| VQENYLEYR | QDLVQENYLEYRQVP | 250 | | | | | | | | | 1949 |
| FGIEVVEVV | QLVFGIEVVEVVPIS | 161 | | | | 0.0072 | | | | | 1950 |
| IETSYVKVL | RALIETSYVKVLHHT | 278 | | | | | | | | | 1951 |
| VTKAEMLES | RAPVTKAEMLESVLR | 129 | | | | | | | | | 1952 |
| LMQDLVQEN | RKLLMQDLVQENYLE | 245 | | | | 0.1500 | | | | | 1953 |
| YILVTCLGL | SHLYILVTCLGLSYD | 175 | | | | | | | | | 1954 |
| LVEVTLGEV | SSTLVEVTLGEVPAA | 44 | | | | | | | | | 1955 |
| LHVLAHA | TGLLHVLAHAIEG | 201 | 0.0008 | | | | −0.0032 | | | | 1956 |
| VHFLLLKYR | VELVHFLLLKYRARE | 116 | | | | | | | | | 1957 |
| VPISHLYIL | VEVVPISHLYILVTC | 169 | | | | | | | | | 1958 |
| IEVVEVVPI | VFGIEVVEVVPISHL | 163 | | | | | | | | | 1959 |
| ISHLYILVT | VVPISHLYILVTCLG | 171 | | | | | | | | | 1960 |
| LSMLEVFEG | WEELSMLEVFEGRED | 224 | | | | | | | | | 1961 |
| LWGPRALIE | YEFLWGPRALIETSY | 271 | | | | | | | | | 1962 |

| Core | Exemplary | | | | | | |
|---|---|---|---|---|---|---|---|
| Sequence | Sequence | DR6w19 | DR7 | DR8w2 | DR9 | DRw53 | SEQ ID NO. |
| LVGAQAPAT | ALGLVGAQAPATEEQ | | −0.0011 | | | | 1913 |
| LSYDGLLGD | CLGLSYDGLLGDNQV | | | | | | 1914 |
| LGDNQVMPK | DGLLGDNQVMPKTGL | | −0.0011 | | | | 1915 |
| IWEELSMLE | EEKIWEELSMLEVFE | | | | | | 1916 |
| WGPRALIET | EFLWGPRALIETSYV | | | | | | 1917 |
| WEELSMLEV | EKIWEELSMLEVFEG | | | | | | 1918 |
| LEYRQVPGS | ENYLEYRQVPGSDPA | | | | | | 1919 |
| ISYPPLHER | EPIHSYPPLHERALR | | −0.0011 | | | | 1920 |
| FQAAISRKM | ESEFQAAISRKMVEL | 0.0067 | 0.5100 | 0.0310 | | | 1921 |
| LGEVPAADS | EVTLGEVPAADSPSP | | | | | | 1922 |
| VIFSKASEY | FFPVIFSKASEYLQL | | | | | | 1923 |
| IFSKASEYL | FPVIFSKASEYLQLV | | | | | | 1924 |
| LGLVGAQAP | GEALGLVGAQAPATE | | | | | | 1925 |
| VVEVVPISH | GIEVVEVVPISHLYI | 0.0710 | 0.0900 | 0.0089 | | | 1926 |
| HVLAHAI | GLLHVLAHAIEGD | | −0.0011 | | | | 1927 |
| LLKYRAREP | HFLLLKYRAREPVTK | | | | | | 1928 |
| ILVTCLGLS | HLYILVTCLGLSYDG | | | | | | 1929 |
| VEVVPISHL | IEVVEVVPISHLYIL | | | | | | 1930 |
| IEGDCAPEE | HAIEGDCAPEEKIW | | | | | | 1931 |
| LAHAIEGD | HVLAHAIEGDCAP | | | | | | 1932 |
| LYILVTCLG | ISHLYILVTCLGLSY | | | | | | 1933 |
| MLESVLRNC | KAEMLESVLRNCQDF | | | | | | 1934 |
| LLHVLAH | KTGLLHVLAHAIE | 0.0015 | 0.0290 | −0.0004 | | | 1935 |
| VPAADSPSP | LGEVPAADSPSPPHS | | −0.0011 | | | | 1936 |
| VGAQAPATE | LGLVGAQAPATEEQQ | | | | | | 1937 |
| VLAHAIEG | LHVLAHAIEGDCA | | 0.0120 | | | | 1938 |
| IVLAHAIE | LLHVLAHAIEGDC | | 0.0130 | | | | 1939 |
| YRAREPVTK | LLKYRAREPVTKAEM | | | | | | 1940 |
| VFGIEVVEV | LQLVFGIEVVEVVPI | | | | | | 1941 |
| VTLGEVPAA | LVEVTLGEVPAADSP | | | | | | 1942 |
| LVHFLLLKY | MVELVHFLLLKYRAR | | | | | | 1943 |
| MPKTGLLH | NQVMPKTGLLHVLA | | −0.0011 | | | | 1944 |
| LLMQDLVQE | PRKLLMQDLVQENYL | | | | | | 1945 |
| FPDLESEFQ | PRMFPDLESEFQAAI | | | | | | 1946 |
| ISRKMVELV | QAAISRKMVELVHFL | | | | | | 1947 |
| PPVIFSKAS | QDFFPVIFSKASEYL | | | | | | 1948 |
| VQENYLEYR | QDLVQENYLEYRQVP | | | | | | 1949 |
| FGIEVVEVV | QLVFGIEVVEVVPIS | | | | | | 1950 |
| IETSYVKVL | RALIETSYVKVLIHEE | | | | | | 1951 |
| VTKAEMLES | REPVTKAEMLESVLR | | | | | | 1952 |
| LMQDLVQEN | RKLLMQDLVQENYLE | | | | | | 1953 |
| YILVTCLGL | SHLYILVTCLGLSYD | | | | | | 1954 |
| LVEVTLGEV | SSTLVEVTLGEVPAA | | | | | | 1955 |
| LHVLAHA | TGLLHVLAHAIEG | | −0.0011 | | | | 1956 |
| VHFLLLKYR | VELVHFLLLKYRARE | | | | | | 1957 |
| VPISHLYIL | VEVVPISHLYILVTC | | | | | | 1958 |
| IEVVEVVPI | VFGIEVVEVVPISHL | | | | | | 1959 |
| ISHLYILVT | VVPISHLYILVTCLG | | | | | | 1960 |
| LSMLEVFEG | WEELSMLEVFEGRED | | | | | | 1961 |
| LWGPRALIE | YEFLWGPRALIETSY | | | | | | 1962 |

| Core | Exemplary | | | | | | | | | | SEQ |
|---|---|---|---|---|---|---|---|---|---|---|---|
| Sequence | Sequence | Position | DR1 | DR2wB1 | DR2wB2 | DR3 | DR4w4 | DR4w15 | DR5w11 | DR5w12 | ID NO. |
| VTCLGLSYD | YILVTCLGLSYDGLL | 178 | | | | | | | | | 1963 |
| LHERALREG | YPPLHERALREGEE | 303 | | | | | | | | | 1964 |
| VPGSDPACY | YRQVPGSDPACYEFL | 260 | | | | | | | | | 1965 |
| VLHITTLKIG | YVKVLHITTLKIGGEP | 285 | | | | | | | | | 1966 |

| Core | Exemplary | | | | | | |
|---|---|---|---|---|---|---|---|
| Sequence | Sequence | DR6w19 | DR7 | DR8w2 | DR9 | DRw53 | SEQ ID NO. |
| VTCLGLSYD | YILVTCLGLSYDGLL | | | | | | 1963 |
| LDERALREG | YPPLHERALREGEE | | | | | | 1964 |
| VPGSDPACY | YRQVPGSDPACYEFL | | | | | | 1965 |
| VLHHFLKIG | YVKVLHHTLKIGGEP | | | | | | 1966 |

[0512] TABLE XIX B
Mage 3 DR Super Motif Peptides with Binding Data

| | | | | | | | | | | | SEQ |
|---|---|---|---|---|---|---|---|---|---|---|---|
| Core | Exemplary | Posi- | | | | | | | | | ID |
| Sequence | Sequence | tion | DR1 | DR2wB1 | DR2w2B2 | DR3 | DR4w4 | DR4w15 | DR5w11 | DR5w12 | NO. |
| VHFLLLKYR | AELVHFLLLKYRARE | 116 | | | | | | | | | 1967 |
| LHVLAHA | AGLLHVLAHAREG | 201 | 0.0045 | | | | −0.0008 | | | | 1968 |
| LVGAQAPAT | ALGLVGAQAPATEEQ | 24 | 0.0330 | | | | −0.0032 | | | | 1969 |
| LSYDGLLGD | CLGLSYDGLLGDNQI | 183 | | | | −0.0025 | | | | | 1970 |
| LGDNQIMPK | DGLLGDNQIMPKAGL | 189 | −0.0003 | | | | −0.0032 | | | | 1971 |
| IWEELSVLE | EEKIWEELSVLEVFE | 220 | | | | 0.0058 | | | | | 1972 |
| WGPRALVET | EFLWGPRALVETSYV | 272 | | | | | | | | | 1973 |
| WEELSVLEV | EKIWEELSVLEVFEG | 221 | | | | | | | | | 1974 |
| LEYRQVPGS | ENYLEYRQVPGSDPA | 255 | | | | | | | | | 1975 |
| FQAALSRKV | ESEFQAALSRKVAEL | 104 | 1.9000 | 0.3100 | 1.1000 | 0.0059 | 0.0590 | | 0.0310 | | 1976 |
| LGEVPAAES | EVTLGEVPAAESPDP | 49 | | | | | | | | | 1977 |
| VIFSKASSS | FFPVIFSKASSSLQL | 148 | | | | | | | | | 1978 |
| IFSKASSSL | FPVIFSKASSSLQLV | 149 | | | | | | | | | 1979 |
| LGLVGAQAP | GEALGLVGAQAPATE | 22 | | | | | | | | | 1980 |
| YIFATCLGL | GHLYIFATCLGLSYD | 175 | 0.0110 | | | | 0.0110 | | | | 1981 |
| LMEVDPIGH | GIELMEVDPIGHLYI | 165 | | | | | | | | | 1982 |
| HVLAHAR | GLLHVLAHAREGD | 202 | | | | | | | | | 1983 |
| ISYPPLHEW | GPHISYPPLHEWVLR | 298 | 0.0022 | | | | −0.0027 | | | | 1984 |
| LLKYHAREP | HFLLLKYRAREPVTK | 120 | | | | | | | | | 1985 |
| IFATCLGLS | HLYIFATCLGLSYDG | 176 | | | | | | | | | 1986 |
| MEVDPIGHL | IELMEVDPIGHLYIF | 166 | 0.0003 | 0.0057 | −0.0010 | 1.8000 | −0.0055 | | −0.0008 | | 1987 |
| LYIFATCLG | IGHLYIFATCLGLSY | 174 | | | | | | | | | 1988 |
| MLGSVVGNW | KAEMLGSVVGNWQYF | 134 | | | | | | | | | 1989 |
| LLHVLAH | KAGLLHVLAHARE | 200 | 0.0043 | | | | −0.0008 | | | | 1990 |
| LTQHFVQEN | KKLLTQHFVQENYLE | 245 | | | | | | | | | 1991 |
| VPAAESPDP | LGEVPAAESPDPPQS | 52 | | | | | | | | | 1992 |
| VGAQAPATE | LGLVGAQAPATEEQE | 25 | | | | | | | | | 1993 |
| VLAHAREG | LHVLAHAREGDCA | 204 | | | | | | | | | 1994 |
| IVLAHARE | LLHVLAHAREGDC | 203 | 0.0026 | | | | −0.0008 | | | | 1995 |
| YRAREPVTK | LLKYRAREPVTKAEM | 123 | | | | | | | | | 1996 |
| VFGIELMEV | LQLVFGIELMEVDPI | 160 | 0.0250 | 0.0020 | 0.0013 | 0.0021 | −0.0032 | | −0.0005 | | 1997 |
| VTLGEVPAA | LVEVTLGEVPAAESP | 47 | | | | | | | | | 1998 |
| MPKAGLLH | NQIMPKAGLLHVLA | 195 | 0.0440 | | | | −0.0032 | | | | 1999 |
| YFFPVIFSK | NWQYFFPVIFSKASS | 144 | 0.1100 | 0.0030 | 0.0300 | 0.0006 | 0.1100 | | 0.0650 | | 2000 |
| FPDLESEFQ | PSTFPDLESEFQAAL | 97 | | | | | | | | | 2001 |
| FSKASSSLQ | PVIFSKASSSLQLVF | 150 | 0.0510 | 0.0170 | −0.0007 | 0.0006 | 0.0240 | | −0.0005 | | 2002 |
| LSRKVAELV | QAALSRKVAELVHFL | 108 | | | | | | | | | 2003 |
| VQENYLEYR | QHFVQENYLEYRQVP | 250 | | | | | | | | | 2004 |
| FGIELMEVD | QLVFGIELMEVDPIG | 161 | | | | 0.0150 | | | | | 2005 |
| FPVIFSKAS | QYFFPVIFSKASSSL | 146 | | | | | | | | | 2006 |
| VETSYVKVL | RALVETSYVKVLHHM | 278 | | | | | | | | | 2007 |
| VTKAEMLGS | REPVTKAEMLGSVVG | 129 | | | | | | | | | 2008 |
| LVEVTLGEV | SSTLVEVTLGEVPAA | 44 | | | | | | | | | 2009 |
| LVHFLLLKY | VAELVHFLLLKYRAR | 115 | | | | | | | | | 2010 |
| IGHLYIFAT | VDPIGHLYIFATCLG | 171 | | | | | | | | | 2011 |
| IELMEVDPI | VFGIELMEVDPIGHL | 163 | | | | | | | | | 2012 |
| WQYFFPVIF | VGNWQYFFPVIFSKA | 142 | | | | | | | | | 2013 |
| LSVLEVFEG | WEELSVLEVFEGRED | 224 | | | | | | | | | 2014 |
| LWGPRALVE | YEFLWGPRALVETSY | 271 | | | | | | | | | 2015 |
| LHEWVLREG | YPPLHEWVLREGEE | 303 | | | | | | | | | 2016 |

| Core | Exemplary | | | | | | |
|---|---|---|---|---|---|---|---|
| Sequence | Sequence | DR6w19 | DR7 | DR8w2 | DR9 | DRw53 | SEQ ID NO. |
| VHFLLLKYR | AELVHFLLLKYRARE | | | | | | 1967 |
| LHVLAHA | AGLLHVLAHAREG | | −0.0026 | | | | 1968 |
| LVGAQAPAT | ALGLVGAQAPATEEQ | | −0.0011 | | | | 1969 |
| LSYDGLLGD | CLGLSYDGLLGDNQI | | | | | | 1970 |
| LGDNQIMPK | DGLLGDNQIMPKAGL | | −0.0011 | | | | 1971 |
| IWEELSVLE | EEKIWEELSVLEVFE | | | | | | 1972 |
| WGPRALVET | EFLWGPRALVETSYV | | | | | | 1973 |
| WEELSVLEV | EKIWEELSVLEVFEG | | | | | | 1974 |
| LEYRQVPGS | ENYLEYRQVPGSDPA | | | | | | 1975 |
| FQAALSRKV | ESEFQAALSRKVAFL | 0.0005 | 0.7400 | 0.0430 | | | 1976 |
| LGEVPAAES | EVTLGEVPAAESPDP | | | | | | 1977 |
| VIFSKASSS | FFPVIFSKASSSLQL | | | | | | 1978 |
| IFSKASSSL | FPVIFSKASSSLQLV | | | | | | 1979 |
| LGLVGAQAP | GEALGLVGAQAPATE | | | | | | 1980 |
| YIFATCLGL | GHLYIFATCLGLSYD | | 0.0025 | | | | 1981 |
| LMEVDPIGH | GIELMEVDPIGHLYI | | | | | | 1982 |
| HVLAHAR | GLLHVLAHAREGD | | | | | | 1983 |
| ISYPPLHEW | GPHISYPPLHEWVLR | | −0.0018 | | | | 1984 |
| LLKYRAREP | HFLLLKYRAREPVTK | | | | | | 1985 |
| IFATCLGLS | HLYIFATCLGLSYDG | | | | | | 1986 |
| MEVDPIGHL | IELMEVDPIGHLYIF | 0.0130 | 0.0027 | 0.0130 | | | 1987 |
| LYIFATCLG | IGHLYIFATCLGLSY | | | | | | 1988 |
| MLGSVVGNW | KAEMLGSVVGNWQYF | | | | | | 1989 |
| LLHVLAH | KAGLLHVLAHARE | | −0.0011 | | | | 1990 |
| LTQHFVQEN | KKLLTQHFVQENYLE | | | | | | 1991 |
| VPAAESPDP | LGEVPAAESPDPPQS | | | | | | 1992 |
| VGAQAPATE | LGLVGAQAPATEEQE | | | | | | 1993 |
| VLAHAREG | LHVLAHAREGDCA | | | | | | 1994 |
| IVLAHARE | LLHVLAHAREGDC | | −0.0018 | | | | 1995 |
| YRAREPVTK | LLKYRAREPVTKAEM | | | | | | 1996 |
| VFGIELMEV | LQLVFGIELMEVDPI | 0.0004 | 0.0970 | −0.0004 | | | 1997 |
| VTLGEVPAA | LVEVTLGEVPAAESP | | | | | | 1998 |
| MPKAGLLH | NQIMPKAGLLHVLA | | −0.0011 | | | | 1999 |
| YFFPVIFSK | NWQYFFPVIFSKASS | −0.0003 | 0.0560 | 0.2200 | | | 2000 |
| FPDLESEFQ | PSTFPDLESEFQAAL | | | | | | 2001 |
| FSKASSSLQ | PVIFSKASSSLQLVF | 0.0240 | 0.0890 | 0.0038 | | | 2002 |
| LSRKVAELV | QAALSRKVAELVHFL | | | | | | 2003 |
| VQENYLEYR | QHFVQENYLEYRQVP | | | | | | 2004 |
| FGIELMEVD | QLVFGIELMEVDPIG | | | | | | 2005 |
| FPVIFSKAS | QYFFPVIFSKASSSL | | | | | | 2006 |
| VETSYVKVL | RALVETSYVKVLHHM | | | | | | 2007 |
| VTKAEMLGS | REPVTKAEMLGSVVG | | | | | | 2008 |
| LVEVTLGEV | SSTLVEVTLGEVPAA | | | | | | 2009 |
| LVHFLLLKY | VAELVHFLLLKYRAR | | | | | | 2010 |
| IGHLYIFAT | VDPIGHLYIFATCLG | | | | | | 2011 |
| IELMEVDPI | VFGIELMEVDPIGHL | | | | | | 2012 |
| WQYFFPVIF | VGNWQYFFPVIFSKA | | | | | | 2013 |
| LSVLEVFEG | WEELSVLEVFEGRED | | | | | | 2014 |
| LWGPRALVE | YEFLWGPRALVETSY | | | | | | 2015 |
| LHEWVLREG | YPPLHEWVLREGEE | | | | | | 2016 |

| | | | | | | | | | | | SEQ |
|---|---|---|---|---|---|---|---|---|---|---|---|
| Core | Exemplary | Posi- | | | | | | | | | ID |
| Sequence | Sequence | tion | DR1 | DR2wB1 | DR2wB2 | DR3 | DR4w4 | DR4w15 | DR5w11 | DR5w12 | NO. |
| VPGSDPACY | YRQVPGSDPACYEFL | 260 | | | | | | | | | 2017 |
| VLHHMVKIS | YVKVLHHMVKISGGP | 285 | | | | | | | | | 2018 |

| Core | Exemplary | | | | | | |
|---|---|---|---|---|---|---|---|
| Sequence | Sequence | DR6w19 | DR7 | DR8w2 | DR9 | DRw53 | SEQ ID NO. |
| VPGSDPACY | YRQVPGSDPACYEFL | | | | | | 2017 |
| VLHHMVKIS | YVKVLHHMVKISGGP | | | | | | 2018 |

[0513] TABLE XXa A
Mage 2 DR 3a Motif Peptides with Binding Data

| Core | Exemplary | | | | | | | | | | SEQ ID |
|---|---|---|---|---|---|---|---|---|---|---|---|
| Sequence | Sequence | Position | DR1 | DR2w2B1 | DR2w2B2 | DR3 | DR4w4 | DR4w15 | DR5w11 | DR5w12 | NO. |
| LSYDGLLGD | CLGLSYDGLLGDNQV | 183 | | | | 0.1400 | | | | | 2019 |
| IWEELSMLE | EEKIWEELSMLEVFE | 220 | | | | 0.0130 | | | | | 2020 |
| LESEFQAAI | FPDLESEFQAAISRK | 100 | | | | 0.0033 | | | | | 2021 |
| MFPDLESEF | GPRMFPDLESEFQAA | 96 | | | | 0.0890 | | | | | 2022 |
| IEGDCAPEE | HAIEGDCAPEEKIW | 210 | | | | 0.0660 | | | | | 2023 |
| IAIEGDCAP | LAHAIEGDCAPEEK | 208 | | | | 0.0190 | | | | | 2024 |
| LVQENYLEY | MQDLVQENYLEYRQV | 249 | | | | 0.2000 | | | | | 2025 |
| FGIEVVEVV | QLVFGIEVVEEVVPIS | 161 | | | | 0.0072 | | | | | 2026 |
| LMQDLVQEN | RKLLMQDLVQENYLE | 245 | | | | 0.1500 | | | | | 2027 |
| LLGDNQVMP | YDGLLGDNQVMPKTG | 188 | | | | 0.0270 | | | | | 2028 |

| Core | Exemplary | | | | | | |
|---|---|---|---|---|---|---|---|
| Sequence | sequence | DR6w19 | DR7 | DR8w2 | DR9 | DRw53 | SEQ ID NO. |
| LSYDGLLGD | CLGLSYDGLLGDNQV | | | | | | 2019 |
| IWEELSMLE | EEKIWEELSMLEVFE | | | | | | 2020 |
| LESEFQAAI | FPDLESEFQAAISRK | | | | | | 2021 |
| MFPDLESEF | GPRMFPDLESEFQAA | | | | | | 2022 |
| IEGDCAPEE | HAIEGDCAPEEKIW | | | | | | 2023 |
| IAIEGDCAP | LAHAIEGDCAPEEK | | | | | | 2024 |
| LVQENYLEY | MQDLVQENYLEYRQV | | | | | | 2025 |
| FGIEVVEVV | QLVFGIEVVEEVVPIS | | | | | | 2026 |
| LMQDLVQEN | RKLLMQDLVQENYLE | | | | | | 2027 |
| LLGDNQVMP | YDGLLGDNQVMPKTG | | | | | | 2028 |

[0514] TABLE XXa B
Mage 3 DR 3a Motif Peptides with Binding Data

| Core | Exemplary | | | | | | | | | | SEQ ID |
|---|---|---|---|---|---|---|---|---|---|---|---|
| Sequence | Sequence | Position | DR1 | DR2w2B1 | DR2w2B2 | DR3 | DR4w4 | DR4w15 | DR5w11 | DR5w12 | NO. |
| LSYDGLLGD | CLGLSYDGLLGDNQI | 183 | | | | −0.0025 | | | | | 2029 |
| IWEELSVLE | EEKIWEELSVLEVFE | 220 | | | | 0.0058 | | | | | 2030 |
| LESEFQAAL | FPDLESEFQAALSRK | 100 | | | | 0.0026 | | | | | 2031 |
| MEVDPIGHL | IELMEVDPIGHLYIF | 166 | 0.0003 | 0.0057 | −0.0010 | 1.8000 | −0.0055 | | −0.0008 | | 2032 |
| IAREGDCAP | LAHAREGDCAPEEK | 208 | | | | −0.0025 | | | | | 2033 |
| FGIELMEVD | QLVFGIELMEVDPIG | 161 | | | | 0.0150 | | | | | 2034 |
| FVQENYLEY | TQHFVQENYLEYRQV | 249 | | | | 0.2800 | | | | | 2035 |
| LLGDNQIMP | YDGLLGDNQIMPKAG | 188 | | | | 0.0080 | | | | | 2036 |

| Core | Exemplary | | | | | | |
|---|---|---|---|---|---|---|---|
| Sequence | Sequence | DR6w19 | DR7 | DR8w2 | DR9 | DRw53 | SEQ ID NO. |
| LSYDGLLGD | CLGLSYDGLLGDNQI | | | | | | 2029 |
| IWEELSVLE | EEKIWEELSVLEVFE | | | | | | 2030 |
| LESEFOAAL | FPDLESEFQAALSRK | | | | | | 2031 |
| MEVDPIGHL | IELMEVDPIGHLYIF | 0.0130 | 0.0027 | 0.0130 | | | 2032 |
| IAREGDCAP | LAIIAREGDCAPEEK | | | | | | 2033 |
| FGIELMEVD | QLVFGIELMEVDPIG | | | | | | 2034 |
| FVOENYLEY | TQHFVQENYLEYRQV | | | | | | 2035 |
| LLGDNOIMP | YDGLLGDNQIMPKAG | | | | | | 2036 |

[0515] TABLE XXb A
Mage 2 DR 3b Motif Peptides with Binding Data

| Core | Exemplary | | | | | | |
|---|---|---|---|---|---|---|---|
| Sequence | Sequence | DR6w19 | DR7 | DR8w2 | DR9 | DRw53 | SEQ ID NO. |
| AAISRKMVE | EFQAAISRKMVELVH | | | | | | 2037 |
| MPLEQRSQH | MPLEQRSQHCKP | | | | | | 2038 |
| IGGEPHISY | TLKIGGEPHISYPPL | | | | | | 2039 |
| LHHTLKIGG | VKVLHHTLKIGGEPH | | | | | | 2040 |

| Core | Exemplary | | | | | | | | | | SEQ ID |
|---|---|---|---|---|---|---|---|---|---|---|---|
| Sequence | Sequence | Position | DR1 | DR2w2B1 | DR2w2B2 | DR3 | DR4w4 | DR4w15 | DR5w11 | DR5w12 | NO. |
| AAISRKMVE | EFQAAISRKMVELVH | 106 | | | | 0.0039 | | | | | 2037 |
| MPLEQRSQH | MPLEQRSQHCKP | 1 | | | | | | | | | 2038 |
| IGGEPIHSY | TLKIGGEPHISYPPL | 292 | | | | −0.0025 | | | | | 2039 |
| LHHTLKIGG | VKVLHHTLKIGGEPH | 286 | | | | −0.0025 | | | | | 2040 |

[0516] TABLE XXb B
Mage 3 DR 3b Motif Peptides with Binding Data

| Core | Exemplary | | | | | | | | | | SEQ ID |
|---|---|---|---|---|---|---|---|---|---|---|---|
| Sequence | Sequence | Position | DR1 | DR2w2B1 | DR2w2B2 | DR3 | DR4w4 | DR4w15 | DR5w11 | DR5w12 | NO. |
| ILGDPKKLL | EDSILGDPKKLLTQH | 237 | 0.0003 | −0.0006 | −0.0010 | 0.6700 | −0.0055 | | −0.0008 | | 2041 |
| AALSRKVAE | EFQAALSRKVAELVH | 106 | | | | 0.0027 | | | | | 2042 |
| MPLEQRSQH | MPLEQRSQHCKP | 1 | | | | | | | | | 2043 |

| Core | Exemplary | | | | | | |
|---|---|---|---|---|---|---|---|
| Sequence | Sequence | DR6w19 | DR7 | DR8w2 | DR9 | DRw53 | SEQ ID NO. |
| ILGDPKKLL | EDSILGDPKKLLTQH | 0.0130 | −0.0014 | 0.0029 | | | 2041 |
| AALSRKVAE | EFQAALSRKVAELVH | | | | | | 2042 |
| MPLEQRSQH | MPLEQRSQHCKP | | | | | | 2043 |

[0517] TABLE XXI
Population coverage with combined HLA Supertypes

| | PHENOTYPIC FREQUENCY | | | | | |
|---|---|---|---|---|---|---|
| | | North | | | | |
| | | American | | | | |
| HLA-SUPERTYPES | Caucasian | Black | Japanese | Chinese | Hispanic | Average |
| a. Individual Supertypes | | | | | | |
| A2 | 45.8 | 39.0 | 42.4 | 45.9 | 43.0 | 43.2 |
| A3 | 37.5 | 42.1 | 45.8 | 52.7 | 43.1 | 44.2 |
| B7 | 43.2 | 55.1 | 57.1 | 43.0 | 49.3 | 49.5 |
| A1 | 47.1 | 16.1 | 21.8 | 14.7 | 26.3 | 25.2 |
| A24 | 23.9 | 38.9 | 58.6 | 40.1 | 38.3 | 40.0 |
| B44 | 43.0 | 21.2 | 42.9 | 39.1 | 39.0 | 37.0 |
| B27 | 28.4 | 26.1 | 13.3 | 13.9 | 35.3 | 23.4 |
| B62 | 12.6 | 4.8 | 36.5 | 25.4 | 11.1 | 18.1 |
| B58 | 10.0 | 25.1 | 1.6 | 9.0 | 5.9 | 10.3 |
| b. Combined Supertypes | | | | | | |
| A2, A3, B7 | 84.3 | 86.8 | 89.5 | 89.8 | 86.8 | 87.4 |
| A2, A3, B7, A24, B44, A1 | 99.5 | 98.1 | 100.0 | 99.5 | 99.4 | 99.3 |
| A2, A3, B7, A24, B44, A1, | 99.9 | 99.6 | 100.0 | 99.8 | 99.9 | 99.8 |
| B27, B62, B58 | | | | | | |

[0518] TABLE XXII

| | | | | | | | | |
|---|---|---|---|---|---|---|---|---|
| | | | A*0201 | A*0202 | A*0203 | A*0206 | A*6802 | No. A2 Alleles |
| Source | AA | Sequence | nM | nM | nM | nM | nM | Crossbound |

Crossbinding data A2 supermotif peptides

| | | | | | | | | |
|---|---|---|---|---|---|---|---|---|
| MAGE2.112 | 9 | KMVELVHFL | 38 | 15 | 9.1 | 49 | 364 | 5 |
| MAGE2.112 | 10 | KMVELVHFLL | 23 | 39 | 127 | 9.0 | 2667 | 4 |
| MAGE2.112 | 11 | KMVELVHFLLL | 5.0 | 45 | 63 | 109 | 7692 | 4 |
| MAGE2.153 | 9 | KASEYLQLV | 152 | 116 | 17 | 185 | 4878 | 4 |
| MAGE2.157 | 10 | YLQLVFGIEV | 50 | 165 | 345 | 370 | 9302 | 4 |
| MAGE2.160 | 10 | LVFGIEVVEV | 357 | 21 | 44 | 29 | 8.0 | 5 |
| MAGE2.220 | 9 | KIWEELSML | 167 | 642 | 175 | 29 | — | 3 |
| MAGE2.271 | 9 | FLWGPRALI | 238 | 96 | 137 | 1542 | 95 | 4 |
| MAGE2.277 | 10 | ALIETSYVKV | 500 | 729 | 125 | 1947 | 3077 | 2 |
| MAGE2/3.44 | 10 | TLVEVTLGEV | 67 | 39 | 4.3 | 218 | 33 | 5 |
| MAGE3.112 | 9 | KVAELVHFL | 68 | 29 | 14 | 168 | 17 | 5 |
| MAGE3.112 | 10 | KVAELVHFLL | 54 | 36 | 217 | 206 | 11 | 5 |
| MAGE3.159 | 11 | QLVFGIELMEV | 7.9 | 74 | 217 | 185 | 267 | 5 |
| MAGE3.160 | 10 | LVFGIELMEV | 29 | 20 | 7.7 | 29 | 14 | 5 |
| MAGE3.174 | 11 | HLYIFATCLGL | 56 | 741 | 769 | — | 4494 | 1 |
| MAGE3.176 | 9 | YIFATCLGL | 185 | 45 | 37 | 1028 | 222 | 4 |
| MAGE3.195 | 11 | IMPKAGLLIIV | 20 | 226 | 15 | 176 | — | 4 |
| MAGE3.220 | 9 | KIWEELSVL | 333 | 391 | 2381 | 308 | — | 3 |
| MAGE3.271 | 9 | FLWGPRALV | 31 | 43 | 14 | 336 | 40 | 5 |

A2 supermotif analogs

| | | | | | | | | |
|---|---|---|---|---|---|---|---|---|
| MAGE3.112 | 9 | KVAELVHFL | 69 | 29 | 14 | 168 | 17 | 5 |
| MAGE3.112L2 | 9 | KLAELVHFL | 20 | 6.0 | 5.9 | 12 | 400 | 5 |
| MAGE3.112M2 | 9 | KMAELVHFL | 24 | 6.7 | 7.7 | 26 | 286 | 5 |
| MAGE3.112L2V9 | 9 | KLAELVHFV | 14 | 13 | 22 | 15 | 73 | 5 |
| MAGE3.112M2V9 | 9 | KMAELVHFV | 26 | 17 | 46 | 39 | 170 | 5 |
| MAGE3.220 | 9 | KTWEELSVL | 333 | 391 | 2381 | 308 | — | 3 |
| MAGE3.220L2V9 | 9 | KLWEELSVV | 11 | 165 | 20 | 15 | — | 4 |

— indicates binding affinity = 10,000 nM.

[0519] TABLE XXIII
HLA-A3 Supermotif-bearing Peptides

| | | | | | | | | No. of | | | Pub- | |
|---|---|---|---|---|---|---|---|---|---|---|---|---|
| | | | | | | | | A3 | | | lished | Pub- |
| | | | | | | | | Alleles | CTL | | CTL | lished |
| | | | A*0301 | A*1101 | A*3101 | A*3301 | A*6801 | Cross- | Wild- | CTL | Wild- | CTL |
| AA | Sequence | Source | nM | nM | nM | nM | nM | bound | type | Tumor | type | Tumor |
| 10 | LLGDNQIMPK | MAGE1/3.189 | 500 | 375 | — | - | 372 | 3 | | | | |
| 9 | SVFSTTINK | MAGE2.69.V2K9 | 20 | 8.2 | 3333 | 9667 | 5.7 | 3 | | | | |
| 9 | SVFSTTINR | MAGE2.69.V2R9 | 58 | 6.3 | 62 | 88 | 6.7 | 5 | | | | |
| 9 | SSFSTTINK | MAGE2.69 | 69 | 3.0 | 2195 | — | 26 | 3 | | | | |
| 11 | FSTTINYTLWR | MAGE2.71 | 1000 | 353 | 257 | 3919 | 163 | 3 | | | | |
| 10 | STTINYTLWK | MAGE2.72 | 126 | 9.2 | — | — | 258 | 3 | | | | |
| 9 | TTINYTLWR | MAGE2.73 | 204 | 11 | 237 | 171 | 17 | 5 | 7/7 | 2/5 | | |
| 9 | TVINYTLWR | MAGE2.73.V2 | 262 | 77 | 720 | 433 | 15 | 4 | | | | |
| 9 | TVINYTLWK | MAGE2.73.V2K9 | 306 | 97 | 9000 | — | 62 | 3 | | | | |
| 8 | LVHFLLLK | MAGE2/3.116 | 379 | 40 | — | — | 400 | 3 | | | | |
| 9 | LVHFLLLKK | MAGE2/3.116.K9 | 21 | 4.3 | — | — | 381 | 3 | | | | |
| 9 | SMLEVFEGR | MAGE2.226 | 5500 | 273 | 37 | 9.0 | 1818 | 3 | | | | |
| 9 | SMLEVFEGK | MAGE2.226 | 116 | 3.8 | 120 | 387 | 2581 | 4 | | | | |
| 8 | SVFAHPRK | MAGE2.237 | 78 | 74 | 1385 | — | 182 | 3 | | | | |
| 9 | AVIETSYVK | MAGE2.277.V2 | 393 | 63 | — | — | 31 | 3 | | | | |
| 9 | AVIETSYVR | MAGE2.277.V2R9 | — | 171 | 129 | 1160 | 15 | 3 | | | | |
| 9 | ALIETSYVK | MAGE2.277 | 136 | 32 | 900 | — | 286 | 3 | | | | |
| 9 | IVYPPLHER | MAGE2.299.V2 | 117 | 375 | 95 | 32 | 14 | 5 | | | | |
| 9 | IVYPPLHEK | MAGE2.299.V2K9 | 42 | 103 | 857 2990 | 42 | 3 | | | | | |
| 9 | ISYPPLHER | MAGE2.299 | 324 | 214 | 23 | 36 | 81 | 5 | | | | |
| 9 | LVHFLLLKY | MAGE2/3.116 | 297 | 500 | — | 8788 | 8000 | 2 | | | | |
| 9 | LVHFLLLKR | MAGE2/3.116.R9 | 440 | 375 | 237 | 94 | 27 | 5 | | | | |
| 9 | YFFPVIFSK | MAGE3.138 | 5000 | 462 | 316 | 207 | 571 | 3 | | | | |
| 9 | YVFPVIFSK | MAGE3.138.V2 | 24 | 3.0 | 2769 | 784 | 1.7 | 3 | | | | |
| 9 | YVFPVIFSR | MAGE3.138.V2R | 936 | 2.6 | 6.0 | 13 | 0.50 | 5 | | | | |
| 9 | SVLEVFEGR | MAGE3.226 | — | 43 | 106 | 44 | 93 | 4 | | | | |
| 9 | SVLEVFEGK | MAGE3.226.K9 | 83 | 6.7 | 129 | 460 | 186 | 5 | | | | |

— indicates binding affinity > 10,000 nM.

[0520] TABLE XXIV
HLA-B7 Supermotif-Bearing Peptides

| | | | | | | | | No. of B7 | | |
|---|---|---|---|---|---|---|---|---|---|---|
| | | | B*0702 | | | | | Alleles | CTL | CTL |
| AA | Sequence | Source | nM | B*3501 nM | B*5101 nM | B*5301 nM | B*5401 nM | Crossbound | Wild-type | Tumor |
| 9 | VPISHLYIL | MAGE2.170 | 22 | 171 | 96 | 239 | 3125 | 4 | 6/6 | 0/6 |
| 9 | FPISHLYIL | MAGE2.170.F1 | 16 | 7.3 | 6.1 | 7.0 | 28 | 5 | | |
| 9 | VPISHLYAL | MAGE2.170.A8 | 23 | 195 | 135 | 6643 | 8333 | 3 | | |
| 9 | VPISMLYIL | MAGE2.170.M5 | 164 | 274 | 70 | 1069 | 1493 | 3 | | |
| 10 | VPISHLYILV | MAGE2.170 | 2037 | — | 42 | 5471 | 100 | 2 | | |
| 10 | VPISHLYILI | MAGE2.170.110 | 367 | 2667 | 50 | 169 | 2222 | 3 | | |
| 8 | FPISHLYI | MAGE2.170.F1I8 | 212 | 655 | 42 | 358 | 59 | 4 | | |
| 9 | FPISHLYII | MAGE2.170.F1I9 | 2.9 | 14 | 4.2 | 4.4 | 0.60 | 5 | | |
| 9 | FPISHLYIL | MAGE2.170.F1 | 2.2 | 3.6 | 5.5 | 4.9 | 0.80 | 5 | | |
| 10 | FPISHLYILI | MAGE2.170.F1I10 | 97 | 17 | 13 | 4.9 | 2.6 | 5 | | |
| 10 | FPISHLYILV | MAGE2.170.F1 | 104 | 51 | 11 | 55 | 0.70 | 5 | | |
| 8 | FPKTGLLI | MAGE2.196.F1I8 | 134 | — | 16 | 3321 | 37 | 3 | | |
| 9 | FPKTGLLII | MAGE2.196.F1 | 367 | — | 32 | 266 | 10 | 4 | | |
| 11 | FPRKLLMQDLI | MAGE2.241.F1 | 86 | — | 367 | 1603 | 100 | 3 | | |
| 11 | FPRALIETSYI | MAGE2.274.F1I11 | 7.4 | 3600 | 70 | 465 | 127 | 4 | | |
| 11 | FPRALIETSYV | MAGE2.274.F1 | 6.3 | 4500 | 128 | 7750 | 7.1 | 3 | | |
| 9 | FPHISYPPL | MAGE2.296.F1 | 1.7 | 18 | 177 | 490 | 3.8 | 5 | | |
| 8 | FPQGASSI | MAGE3.64.F1 | 23 | — | 21 | 3000 | 400 | 3 | | |
| 9 | LPTTMNYPL | MAGE3.71 | 68 | 28 | 1964 | 266 | 2564 | 3 | | |
| 9 | FPTTMNYPI | MAGE3.71.F1I9 | 59 | 22 | 14 | 8.5 | 1.5 | 5 | | |
| 9 | FPTTMNYPL | MAGE3.71.F1 | 6.4 | 4.5 | 423 | 39 | 3.0 | 5 | | |
| 9 | LPTTMNYPI | MAGE3.71.I9 | 100 | 343 | 31 | 182 | 4.2 | 5 | | |
| 10 | FPTTMNYPLW | MAGE3.71.F1 | 220 | 248 | — | 11 | 42 | 4 | | |
| 8 | YPLWSQSI | MAGE3.77.I8 | 60 | 3790 | 5.8 | 258 | 238 | 4 | | |
| 8 | FPLWSQSI | MAGE3.77.F1 | 122 | 1014 | 12 | 245 | 15 | 4 | | |
| 9 | FPIGHLYII | MAGE3.170.F1I9 | 3.4 | 77 | 5.0 | 7.2 | 0.60 | 5 | | |
| 10 | FPIGHLYIFA | MAGE3.170.F1 | 39 | 51 | 56 | 179 | 0.40 | 5 | | |
| 10 | FPIGHLYIFI | MAGE3.170.F1I10 | 63 | 139 | 5.7 | 8.5 | 2.9 | 5 | | |
| 9 | MPKAGLLII | MAGE3.196 | 932 | 5143 | 393 | 90 | 248 | 3 | | |
| 9 | MPVAGLLII | MAGE3.196.V3 | 86 | 66 | 1.2 | 2.3 | 112 | 5 | | |
| 10 | MPKAGLLIIV | MAGE3.196 | 1774 | — | 393 | — | 12 | 2 | | |
| 8 | MPKAGLLI | MAGE3.196 | 42 | — | 12 | 358 | 313 | 4 | | |
| 10 | MPKAGLLIII | MAGE3.196.I10 | 324 | 2400 | 62 | 176 | 102 | 4 | | |
| 8 | FPKAGLLI | MAGE3.196.F1I8 | 31 | — | 8.2 | 775 | 46 | 3 | | |
| 10 | FPKAGLLIII | MAGE3.196.F1I10 | 204 | 2667 | 65 | 846 | 21 | 3 | | |
| 10 | FPKAGLLIIV | MAGE3.196.F1 | 220 | 878 | 190 | 4650 | 1.1 | 3 | | |
| 11 | FPRALVETSYI | MAGE3.274.F1I11 | 7.2 | 5539 | 117 | 620 | 59 | 3 | | |
| 11 | FPRALVETSYV | MAGE3.274.F1 | 4.2 | 4235 | 204 | — | 10 | 3 | | |
| 9 | FPHISYPPI | MAGE3.296.F1I9 | 2.9 | 360 | 18 | 233 | 1.4 | 5 | | |

— indicates binding affinity > 10,000 nM.

[0521] TABLE XXV
HLA-A1 Motif-Bearing Peptides

| | | | | Pub- | |
|---|---|---|---|---|---|
| | | | | lished | Pub- |
| | | | | CTL | lished |
| | | | A*0101 | Wild- | CTL |
| AA | Sequence | Source | nM | type | Tumor |
| 10 | ASSFSTTINY | MAGE2.68 | 147 | | |
| 10 | ATSFSTTINY | MAGE2.68.T2 | 455 | | |
| 10 | ASDFSTTINY | MAGE2.68.D3 | 25 | | |
| 9 | STFSTTINY | MAGE2.69.T2 | 490 | | |
| 11 | VVEVVPISHLY | MAGE2.166 | 125 | | |
| 8 | VTDLGLSY | MAGE2.179.D3 | 2.7 | | |
| 10 | LTQDLVQENY | MAGE2.246.T2 | 58 | | |
| 9 | MQDLVQENY | MAGE2.247 | 17 | | |
| 9 | MTDLVQENY | MAGE2.247.T2 | 0.80 | | |
| 10 | ASSLPTTMNY | MAGE3.68 | 9.6 | | |
| 10 | ATSLPTTMNY | MAGE3.68.T2 | 208 | | |
| 10 | ASDLPTTMNY | MAGE3.68.D3 | 2.6 | | |
| 9 | SSLPTTMNY | MAGE369 | 676 | | |
| 9 | STLPTTMNY | MAGE3.69.T2 | 58 | | |
| 11 | TMNYPLWSQSY | MAGE3.74 | 301 | | |
| 9 | GTVVGNWQY | MAGE3.137.T2 | 36 | | |
| 11 | LMEVDPIGHLY | MAGE3.166 | 3.3 | | |
| 9 | EVDPIGHLY | MAGE3.168 | 1.4 | +¹⁾ | + |
| 9 | ETDPIGHLY | MAGE3.168.T2 | 0.70 | | |
| 8 | ATCLGLSY | MAGE3.179 | 227 | | |
| 10 | LTQHFVQENY | MAGE3.246 | 96 | | |
| 10 | LTDHFVQENY | MAGE3.246.D3 | 2.3 | | |
| 9 | ITGGPHISY | MAGE3.293.T2 | 36 | | |

¹⁾Tuting et al., Journal of Immunology 160(3):1139, 1998

[0522] TABLE XXVIa
HLA-A24 Motif-Bearing Peptides

| | | | | Pub | |
|---|---|---|---|---|---|
| | | | | lished | Pub- |
| | | | | CTL | lished |
| | | | A*2402 | Wild- | CTL |
| AA | Sequence | Source | nM | type | Tumor |
| 11 | SFSTTINYTLW | MAGE2.70 | 429 | | |
| 9 | MYPDLESEF | MAGE2.97.Y2 | 52 | | |
| 11 | IFSKASEYLQL | MAGE2.150 | 126 | | |
| 9 | EYLQLVFGI | MAGE2.156 | 3.4 | +³⁾ | + |
| 9 | EYLQLVFGF | MAGE2.156.F9 | 4.0 | | |
| 10 | LYILVTCLGF | MAGE2.175.F10 | 18 | | |
| 9 | VMPKTGLLI | MAGE2.195 | 52 | | |
| 10 | VMPKTGLLII | MAGE2.195 | 207 | | |
| 8 | LWGPRALI | MAGE2.272 | 100 | | |
| 10 | SYVKVLHHTL | MAGE2.282 | 75 | | |
| 10 | SYVKVLHHTF | MAGE2.282.F10 | 34 | | |
| 9 | TYPDLESEF | MAGE3.97.Y2 | 218 | | |
| 9 | NWQYFFPVI | MAGE3.142 | 23 | | |
| 10 | NYQYFFPVIF | MAGE3.142.Y2 | 23 | | |
| 8 | QYFFPVIF | MAGE3.144 | 100 | | |
| 11 | IFSKASSSLQL | MAGE3.150 | 132 | | |
| 10 | LYIFATCLGF | MAGE3.175.F10 | 10 | | |
| 9 | IMPKAGLLI | MAGE3.195 | 29 | +⁴⁾ | + |
| 10 | IMPKAGLLII | MAGE3.195 | 240 | | |
| 11 | IWEELSVLEVF | MAGE3.221 | 462 | | |
| 8 | SYPPLHEW | MAGE3.300 | 286 | | |
| 10 | SYPPLHEWVL | MAGE3.300 | 20 | | |
| 10 | SYPPLHEWVF | MAGE3.300.F10 | 5.5 | | |

³⁾Tahara et al., Clinical Cancer Research 5(8):2236, 1999
⁴⁾Tanaka et al., Cancer Research 57(20):4465, 1997

[0523] TABLE XXVIB
A24 Motif-bearing Peptides

| Peptide | AA | Sequence | Source | A*2401 nM |
|---|---|---|---|---|
| 52.0072 | 8 | LWGPRALI | MAGE2.272 | 100 |
| 52.0073 | 8 | QYFFPVIF | MAGE3.144 | 100 |
| 52.0078 | 8 | SYPPLHEW | MAGE3.300 | 285.7 |
| 52.0102 | 10 | SYPPLHEWVL | MAGE3.300 | 20.3 |
| 52.0166 | 11 | SFSTTINYTLW | MAGE2.70 | 428.6 |
| 52.0167 | 11 | IFSKASEYLQL | MAGE2.150 | 126.3 |
| 52.017 | 11 | IFSKASSSLQL | MAGE3.150 | 131.9 |
| 52.0172 | 11 | IWEELSVLEVF | MAGE3.221 | 461.5 |
| 57.006 | 9 | MYPDLESEF | MAGE2.97.Y2 | 52.2 |
| 57.0061 | 9 | KYVELVHFF | MAGE2.112.Y2F9 | 7.1 |
| 57.0062 | 9 | IYSKASEYF | MAGE2.150.Y2F9 | 14.6 |
| 57.0063 | 9 | EYLQLVFGF | MAGE2.156.F9 | 4 |
| 57.0064 | 9 | VYPKTGLLF | MAGE2.195.Y2F9 | 5.5 |
| 57.0065 | 9 | TYPDLESEF | MAGE3.97.Y2 | 218.2 |
| 57.0066 | 9 | NYQYFFPVF | MAGE3.142.Y2F9 | 3.4 |
| 57.0067 | 9 | IYSKASSSF | MAGE3.150.Y2F9 | 375 |
| 57.0068 | 9 | IYPKAGLLF | MAGE3.195.Y2F9 | 9.2 |
| 57.0084 | 10 | SYSTTINYTF | MAGE2.70.Y2F10 | 14.8 |
| 57.0085 | 10 | LYILVTCLGF | MAGE2.175.F10 | 17.6 |
| 57.0086 | 10 | VYPKTGLLIF | MAGE2.195.Y2F10 | 2.9 |
| 57.0087 | 10 | EYLWGPRALF | MAGE2.270.Y2F10 | 10 |
| 57.0088 | 10 | SYVKVLHHTF | MAGE2.282.F10 | 34.3 |
| 57.009 | 10 | NYQYFFPVIF | MAGE3.142.Y2 | 22.6 |
| 57.0092 | 10 | LYIFATCLGF | MAGE3.175.F10 | 10 |
| 57.0093 | 10 | IYPKAGLLIF | MAGE3.195.Y2F10 | 1.2 |
| 57.0095 | 10 | SYPPLHEWVF | MAGE3.300.F10 | 5.5 |

[0524] TABLE XXVIIa
Immunogenicity of A2 supermotif peptides

| | | | A*0201 | A*0202 | A*0203 | A*0206 | A*6802 | No. A2 Alleles | CTL | CTL |
|---|---|---|---|---|---|---|---|---|---|---|
| Source | AA | Sequence | nM | nM | nM | nM | nM | Crossbound | Wild-type¹ | Tumor |
| MAGE2.112 | 9 | KMVELVHFL | 9.8 | 25 | 17 | 123 | 2353 | 4 | 1/1 | 0/1 |
| MAGE2.112 | 10 | KMVELVHFLL | 23 | 39 | 127 | 9.0 | 2667 | 4 | 1/1 | 0/1 |
| MAGE2.112 | 11 | KMVELVHFLLL | 5.0 | 45 | 63 | 109 | 7692 | 4 | 1/1 | 0/1 |
| MAGE2.153 | 9 | KASEYLQLV | 152 | 116 | 17 | 185 | 4878 | 4 | 2/4 | 0/2 |
| MAGE2.157 | 10 | YLQLVFGIEV | 50 | 165 | 345 | 370 | 9302 | 4 | 3/3 | 1/3 |
| MAGE2.160 | 10 | LVFGIEVVEV | 357 | 20 | 43 | 28 | 8.0 | 5 | 4/4 | 0/3 |
| MAGE3.112 | 9 | KVAELVHFL | 68 | 29 | 14 | 168 | 17 | 5 | 3/4 | 3/4 |
| MAGE3.112 | 10 | KVAELVHFLL | 54 | 36 | 217 | 206 | 11 | 5 | 0/1 | 0/1 |
| MAGE3.159 | 11 | QLVFGIELMEV | 7.9 | 74 | 217 | 185 | 267 | 5 | 3/3 | 1/3² |
| MAGE3.160 | 10 | LVFGIELMEV | 29 | 20 | 7.7 | 28 | 14 | 5 | 4/4 | 1/4² |
| MAGE3.195 | 11 | IMPKAGLLIIV | 20 | 226 | 14 | 176 | —³ | 4 | 3/4 | 0/3 |
| MAGE3.220 | 9 | KIWEELSVL | 357 | 391 | 2381 | 308 | — | 3 | 3/4 | 0/3 |
| MAGE3.271 | 9 | FLWGPRALV | 31 | 43 | 14 | 336 | 40 | 5 | 4/4 | 2/4 |

¹Indicates the number of donors positive over the total number of donors tested.
²A positive result was seen after the second restim.
³— indicates binding affinity = 10,000 nM.

[0525] TABLE XXVIIb
HLA-A2 Supermotif-bearing Peptides

| | | | | | | | | No. of | | | | |
|---|---|---|---|---|---|---|---|---|---|---|---|---|
| | | | | | | | | A2 | | | | |
| | | | | | | | | Alleles | CTL | | CTL | |
| | | | A*0201 | A*0202 | A*0203 | A*0206 | A*6802 | Cross- | Wild- | CTL | Wild- | CTL |
| AA | Sequence | Source | nM | nM | nM | nM | nM | bound | type¹ | Tumor¹ | type² | Tumor² |
| 10 | YLQLVFG1EV | MAGE2.157 | 50 | 165 | 345 | 370 | 9302 | 4 | 313 | 1/3 | | |
| 9 | FLWGPRALI | MAGE2.271 | 238 | 96 | 137 | 1542 | 95 | 4 | | | | |
| 10 | TLVEVTLGEV | MAGE2/3.44 | 67 | 39 | 4.3 | 218 | 33 | 5 | | | | |
| 9 | KVAELVHFL | MAGE3.112 | 69 | 29 | 14 | 168 | 17 | 5 | 3/4 | 3/4 | | |
| 11 | QLVFGIELMEV | MAGE3.159 | 7.9 | 74 | 217 | 185 | 267 | 5 | | | | |
| 10 | LVFGIELMEV | MAGE3.160 | 29 | 20 | 7.7 | 29 | 14 | 5 | 4/4 | 1/4 | | |
| 9 | YIFATCLGL | MAGE3.176 | 185 | 45 | 37 | 1028 | 222 | 4 | | | | |
| 9 | KIWEELSVL | MAGE3.220 | 333 | 391 | 2381 | 308 | — | 3 | 3/4 | | | |
| 9 | KLWEELSVV | MAGE3.220.L2V9 | 11 | 165 | 20 | 15 | — | 4 | | | | |
| 9 | FLWGPRALV | MAGE3 271 | 31 | 43 | 14 | 336 | 40 | 5 | 4/4 | 2/4 | | |

¹Number of donors yielding a positive response/total tested
²Data from ovarian cancer patients

[0526] TABLE XXVIII
DR supertype primary binding

| DR147 | | | | | | DR147 |
|---|---|---|---|---|---|---|
| Algo | | | DR1 | DR4w4 | DR7 | Cross- |
| Sum | Sequence | Source | nM | nM | nM | binding |
| 2 | LGEVPAADSPSPPHS | MAGE2.50 | — | — | — | 0 |
| 3 | ESEFQAAISRKMVEL | MAGE2.102 | 4.2 | 281 | 49 | 3 |
| 2 | GIEVVEVVPISHLYI | MAGE2.163 | 595 | 6429 | 278 | 2 |
| 2 | DGLLGDNQVMPKTGL | MAGE2.187 | — | — | — | 0 |
| 2 | NQVMPKTGLLIIVLA | MAGE2.193 | 2632 | — | — | 0 |
| 2 | KTGLLIIVLAIIAIE | MAGE2.198 | 417 | 1216 | 862 | 2 |
| 2 | TGLLIIVLAIIAIEG | MAGE2.199 | 6250 | — | — | 0 |
| 2 | GLLIIVLAIIAIEGD | MAGE2.200 | 500 | — | — | 1 |
| 3 | LLIIVLAIIAIEGDC | MAGE2.201 | 581 | 3750 | 1923 | 1 |
| 2 | LIIVLAIIAIEGDCA | MAGE2.202 | 417 | 8824 | 2083 | 1 |
| 2 | EPHISYPPLHERALR | MAGE2.296 | — | — | — | 0 |
| 3 | ALGLVGAQAPATEEQ | MAGE2/3.22 | 152 | — | — | 1 |
| 2 | ESEFQAALSRKVAEL | MAGE3.102 | 2.6 | 763 | 34 | 3 |
| 2 | NWQYFFPVIFSKASS | MAGE3.142 | 46 | 409 | 446 | 3 |
| 3 | PVIFSKASSSLQLVF | MAGE3.148 | 98 | 1875 | 281 | 2 |
| 3 | LQLVFGIELMEVDPI | MAGE3.158 | 200 | — | 258 | 2 |
| 3 | GHLYIFATCLGLSYD | MAGE3.173 | 455 | 4091 | — | 1 |
| 2 | DGLLGDNQIMPKAGL | MAGE3.187 | — | — | — | 0 |
| 2 | NQIMPKAGLLIIVLA | MAGE3.193 | 114 | — | — | 1 |
| 2 | AGLLIIVLAIIARE` | MAGE3.198 | 1163 | — | — | 0 |
| 2 | AGLLIIVLAIIAREG | MAGE3.199 | 1111 | — | >9615 | 0 |
| 3 | LLIIVLAIIAREGDC | MAGE3.201 | 1923 | — | — | 0 |
| 2 | GPHISYPPLHEWVLR | MAGE3.296 | 2273 | — | — | 0 |

— indicates binding affinity = 10,000 nM

[0527] TABLE XXIX
DR supertype crossbinding

| | | | | | | | | | | | DR147 | Broad |
|---|---|---|---|---|---|---|---|---|---|---|---|---|
| | | | DR1 | DR4w4 | DR7 | DR2w281 | DR2w282 | Dr6w19 | DR5w11 | DR8w2 | Cross- | Binding |
| Peptide | Sequence | Source | nM | nM | nM | nM | nM | nM | nM | nM | binding | (5/8) |
| 39.0283 | ESEFQAAISRKMVEL | MAGE2.102 | 4.2 | 281 | 49 | 147 | 20 | 522 | 741 | 1581 | 3 | 7 |
| 39.0284 | GIEVVEVVPISHLYI | MAGE2.163 | 595 | 6429 | 278 | 1978 | — | 49 | — | 5506 | 2 | 3 |
| 39.0287 | KTGLLILVLAIIAIE | MAGE2.198 | 417 | 1216 | 862 | 2460 | — | 2333 | — | — | 2 | 2 |
| 39.0296 | ESEFQAALSRKVAEL | MAGE3,102 | 2.6 | 763 | 34 | 29 | 18 | 7000 | 645 | 1140 | 3 | 6 |
| 39.0297 | NWQYFFPVIFSKASS | MAGE3.142 | 46 | 409 | 446 | 3033 | 667 | — | 308 | 223 | 3 | 6 |
| 39.0298 | PVIFSKASSSLQLVF | MAGE3.148 | 98 | 1875 | 281 | 535 | — | 146 | — | — | 2 | 4 |
| 39.0299 | LQLVFGIELMEVDPI | MAGE3.158 | 200 | — | 258 | 4550 | 8750 | — | — | — | 2 | 2 |

— indicates binding affinity = 10,000 nM.

[0528] TABLE XXX
DR3 binding

| | | DR3 |
|---|---|---|
| Sequence | Source | nM |
| GPRMFPDLESEFQAA | MAGE2.94 | 3371 |
| FPDLESEFQAAISRK | MAGE2.98 | — |
| EFQAAISRKMVELVH | MAGE2.104 | — |
| QLVFGTEVVEVVPIS | MAGE2.159 | — |
| CLGLSYDGLLGDNQV | MAGE2.181 | 2143 |
| YDGLLGDNQVMPKTG | MAGE2.186 | — |
| LAIIAIEGDCAPEEK | MAGE2.206 | — |
| IIAIEGDCAPEEKIW | MAGE2.208 | 4546 |
| EEKIWEELSMLEVFE | MAGE2.218 | — |
| RKLLMQDLVQENYLE | MAGE2.243 | 2000 |
| MQDLVQENYLEYRQV | MAGE2.247 | 1500 |
| VKVLHHTLKIGGEPH | MAGE2.284 | — |
| TLKIGGEPHISYPPL | MAGE2.290 | — |
| FPDLESEFQAALSRK | MAGE3.98 | — |
| EFQAALSRKVAELVH | MAGE3.104 | — |
| QLVFGIELMEVDPIG | MAGE3.159 | — |
| IELMEVDPIGHLYIF | MAGE3.164 | 167 |
| CLGLSYDGLLGDNQI | MAGE3.181 | — |
| YDGLLGDNQIMPKAG | MAGE3.186 | — |
| LAIIAREGDGAPEEK | MAGE3.206 | — |
| EEKIWEELSVLEVFE | MAGE3.218 | — |
| EDSILGDPKKLLTQH | MAGE3.235 | 448 |
| TQHFVQENYLEYRQV | MAGE3.247 | 1071 |

— indicates binding affinity = 10,000 nM

[0529] TABLE XXXI
HLA Class II Supermotif and Motif-Bearing Epitopes

| | | | | | | | | | | | |
|---|---|---|---|---|---|---|---|---|---|---|---|
| | | DRB1 | DRB1 | DRB1 | DRB1 | DR1B | DRB1 | DRB1 | DRB1 | DRB5 | No. of DR |
| | | *0101 | *0301 | *0401 | *0701 | *0802 | *1101 | *1302 | *1501 | *0101 | Alleles |
| Sequence | Source | nM | nM | nM | nM | nM | nM | nM | nM | nM | Crossbound |

| | | | | | | | | | | | |
|---|---|---|---|---|---|---|---|---|---|---|---|
| ESEFQAAISRKMVEL | MAGE2.102 | 4.2 — | 281 | 49 | 1581 | 741 | 522 | 147 | 20 | 7 | |
| ESEFQAALSRKVAEL | MAGE3.102 | 2.6 — | 763 | 34 | 1140 | 645 | 7000 | 29 | 18 | 6 | |
| NWQYFFPVIFSKASS | MAGE3.142 | 46 | — | 409 | 446 | 223 | 308 | — | 3033 | 667 | 6 |
| IELMEVDPIGHLYIF | MAGE3.164 | — | 167 | >8182 | 9259 | 3769 | — | 269 | 1597 | — | 1 |
| EDSILGDPKKLLTQH | MAGE3.235 | — | 448 | >8182 | — | — | — | 269 | — | — | 1 |

What is claimed is

1. An isolated prepared MAGE2/3 epitope consisting of a sequence selected from the group consisting of the sequences set out in Tables XXIII, XXIV, XXV, XXVI, XXVII, and XXXI.

2. A composition of claim 1, wherein the epitope is admixed or joined to a CTL epitope.

3. A composition of claim 2, wherein the CTL epitope is selected from the group set out in claim 1.

4. A composition of claim 1, wherein the epitope is admixed or joined to an HTL epitope.

5. A composition of claim 4, wherein the HTL epitope is selected from the group set out in claim 1.

6. A composition of claim 4, wherein the HTL epitope is a pan-DR binding molecule.

7. A composition of claim 1, comprising at least three epitopes selected from the group set out in claim 1.

8. A composition of claim 1, further comprising a liposome, wherein the epitope is on or within the liposome.

9. A composition of claim 1, wherein the epitope is joined to a lipid.

10. A composition of claim 1, wherein the epitope is joined to a linker.

11. A composition of claim 1, wherein the epitope is bound to an HLA heavy chain, β2-microglobulin, and strepavidin complex, whereby a tetramer is formed.

12. A composition of claim 1, further comprising an antigen presenting cell, wherein the epitope is on or within the antigen presenting cell.

13. A composition of claim 12, wherein the epitope is bound to an HLA molecule on the antigen presenting cell, whereby when a cytotoxic lymphocyte (CTL) is present that is restricted to the HLA molecule, a receptor of the CTL binds to a complex of the HLA molecule and the epitope.

14. A clonal cytotoxic T lymphocyte (CTL), wherein the CTL is cultured in vitro and binds to a complex of an epitope selected from the group set out in Tables XXIII, XXIV, XXV, XXVI, and XXVII, bound to an HLA molecule.

15. A peptide comprising at least a first and a second epitope, wherein the first epitope is selected from the group consisting of the sequences set out in Tables XXIII, XXIV, XXV, XXVI, XXVII, and XXXI;
wherein the peptide comprise less than 50 contiguous amino acids that have 100% identity with a native peptide sequence.

16. A composition of claim 15, wherein the first and the second epitope are selected from the group of claim 14.

17. A composition of claim 16, further comprising a third epitope selected from the group of claim 15.

18. A composition of claim 15, wherein the peptide is a heteropolymer.

19. A composition of claim 15, wherein the peptide is a homopolymer.

20. A composition of claim 15, wherein the second epitope is a CTL epitope.

21. A composition of claim 20, wherein the CTL epitope is from a tumor associated antigen that is not MAGE2/3.

22. A composition of claim 15, wherein the second epitope is a PanDR binding molecule.

23. A composition of claim 1, wherein the first epitope is linked to an a linker sequence.

24. A vaccine composition comprising:
a unit dose of a peptide that comprises less than 50 contiguous amino acids that have 100% identity with a native peptide sequence of MAGE2/3, the peptide comprising at least a first epitope selected from the group consisting of the sequences set out in Tables XXIII, XXIV, XXV, XXVI, XXVII, and XXXI; and;
a pharmaceutical excipient.

25. A vaccine composition in accordance with claim 24, further comprising a second epitope.

26. A vaccine composition of claim 24, wherein the second epitope is a PanDR binding molecule.

27. A vaccine composition of claim 24, wherein the pharmaceutical excipient comprises an adjuvant.

28. An isolated nucleic acid encoding a peptide comprising an epitope consisting of a sequence selected from the group consisting of the sequences set out in Tables XXIII, XXIV, XXV, XXVI, XXVII, and XXXI.

29. An isolated nucleic acid encoding a peptide comprising at least a first and a second epitope, wherein the first epitope is selected from the group consisting of the sequences set out in Tables XXIII, XXIV, XXV, XXVI, XXVII, and XXXI; and wherein the peptide comprises less than 50 contiguous amino acids that have 100% identity with a native peptide sequence.

30. An isolated nucleic acid of claim 29, wherein the peptide comprises at least two epitopes selected from the sequences set out in Tables XXIII, XXIV, XXV, XXVI, XXVII, and XXXI.

31. An isolated nucleic acid of claim 30, wherein the peptide comprises at least three epitopes selected from the sequences set out in Tables XXIII, XXIV, XXV, XXVI, XXVII, and XXXI.

32. An isolated nucleic acid of claim 29, wherein the second peptide is a CTL epitope.

33. An isolated nucleic acid of claim 32, wherein the CTL is from a tumor-associated antigen that is not MAGE2/3.

34. An isolated nucleic acid of claim 20, wherein the second peptide is an HTL epitope.

The application's sequence listing, which the Patent Office published only in electronic form, follows.

SEQUENCE LISTING (2479 sequences)

SEQ ID NO: 1 - protein, 9 aa, Artificial Sequence
  Artificial Peptide
ASEYLQLVF

SEQ ID NO: 2 - protein, 10 aa, Artificial Sequence
  Artificial Peptide
ASSFSTTINY

SEQ ID NO: 3 - protein, 10 aa, Artificial Sequence
  Artificial Peptide
DLVQENYLEY

SEQ ID NO: 4 - protein, 8 aa, Artificial Sequence
  Artificial Peptide
ELSMLEVF

SEQ ID NO: 5 - protein, 10 aa, Artificial Sequence
  Artificial Peptide
ELVHFLLLKY

SEQ ID NO: 6 - protein, 10 aa, Artificial Sequence
  Artificial Peptide
ESVLRNCQDF

SEQ ID NO: 7 - protein, 11 aa, Artificial Sequence
  Artificial Peptide
ESVLRNCQDFF

SEQ ID NO: 8 - protein, 11 aa, Artificial Sequence
  Artificial Peptide
EVFEGREDSVF

SEQ ID NO: 9 - protein, 9 aa, Artificial Sequence
  Artificial Peptide
EVVPISHLY

SEQ ID NO: 10 - protein, 10 aa, Artificial Sequence
  Artificial Peptide
FSTTINYTLW

SEQ ID NO: 11 - protein, 9 aa, Artificial Sequence
  Artificial Peptide
GSDPACYEF

SEQ ID NO: 12 - protein, 11 aa, Artificial Sequence
  Artificial Peptide
GSDPACYEFLW

SEQ ID NO: 13 - protein, 9 aa, Artificial Sequence
  Artificial Peptide
HSPQGASSF

SEQ ID NO: 14 - protein, 10 aa, Artificial Sequence
  Artificial Peptide
ILVTCLGLSY

SEQ ID NO: 15 - protein, 11 aa, Artificial Sequence
  Artificial Peptide
ISRKMVELVHF

SEQ ID NO: 16 - protein, 10 aa, Artificial Sequence
  Artificial Peptide
KIGGEPHISY

SEQ ID NO: 17 - protein, 8 aa, Artificial Sequence
  Artificial Peptide
KMVELVHF

SEQ ID NO: 18 - protein, 11 aa, Artificial Sequence
  Artificial Peptide
LLMQDLVQENY

SEQ ID NO: 19 - protein, 10 aa, Artificial Sequence
  Artificial Peptide
LMQDLVQENY

SEQ ID NO: 20 - protein, 9 aa, Artificial Sequence
  Artificial Peptide
LVHFLLLKY

SEQ ID NO: 21 - protein, 9 aa, Artificial Sequence
  Artificial Peptide
LVQENYLEY

SEQ ID NO: 22 - protein, 9 aa, Artificial Sequence
  Artificial Peptide
LVTCLGLSY

SEQ ID NO: 23 - protein, 10 aa, Artificial Sequence
  Artificial Peptide
PVIFSKASEY

SEQ ID NO: 24 - protein, 10 aa, Artificial Sequence
  Artificial Peptide
QVPGSDPACY

SEQ ID NO: 25 - protein, 10 aa, Artificial Sequence
  Artificial Peptide
RMFPDLESEF

SEQ ID NO: 26 - protein, 9 aa, Artificial Sequence
  Artificial Peptide
SSFSTTINY

SEQ ID NO: 27 - protein, 9 aa, Artificial Sequence
  Artificial Peptide
STTINYTLW

SEQ ID NO: 28 - protein, 9 aa, Artificial Sequence
  Artificial Peptide
SVLRNCQDF

SEQ ID NO: 29 - protein, 10 aa, Artificial Sequence
  Artificial Peptide
SVLRNCQDFF

SEQ ID NO: 30 - protein, 8 aa, Artificial Sequence
  Artificial Peptide
TTINYTLW

SEQ ID NO: 31 - protein, 9 aa, Artificial Sequence
  Artificial Peptide
VIFSKASEY

SEQ ID NO: 32 - protein, 8 aa, Artificial Sequence
  Artificial Peptide
VLRNCQDF

SEQ ID NO: 33 - protein, 9 aa, Artificial Sequence
  Artificial Peptide
VLRNCQDFF

SEQ ID NO: 34 - protein, 8 aa, Artificial Sequence
  Artificial Peptide
VTCLGLSY

SEQ ID NO: 35 - protein, 11 aa, Artificial Sequence
  Artificial Peptide
VVEVVPISHLY

SEQ ID NO: 36 - protein, 8 aa, Artificial Sequence
  Artificial Peptide
VVPISHLY

SEQ ID NO: 37 - protein, 11 aa, Artificial Sequence
  Artificial Peptide
YILVTCLGLSY

SEQ ID NO: 38 - protein, 10 aa, Artificial Sequence
  Artificial Peptide
ASSLPTTMNY

SEQ ID NO: 39 - protein, 9 aa, Artificial Sequence
  Artificial Peptide
ASSSLQLVF

SEQ ID NO: 40 - protein, 8 aa, Artificial Sequence
  Artificial Peptide
ATCLGLSY

SEQ ID NO: 41 - protein, 8 aa, Artificial Sequence
  Artificial Peptide
ELSVLEVF

SEQ ID NO: 42 - protein, 10 aa, Artificial Sequence
  Artificial Peptide
ELVHFLLLKY

SEQ ID NO: 43 - protein, 10 aa, Artificial Sequence
  Artificial Peptide
EMLGSVVGNW

SEQ ID NO: 44 - protein, 9 aa, Artificial Sequence
  Artificial Peptide
EVDPIGHLY

SEQ ID NO: 45 - protein, 11 aa, Artificial Sequence
  Artificial Peptide
EVDPIGHLYIF

SEQ ID NO: 46 - protein, 9 aa, Artificial Sequence
  Artificial Peptide
FVQENYLEY

SEQ ID NO: 47 - protein, 9 aa, Artificial Sequence
  Artificial Peptide
GSDPACYEF

SEQ ID NO: 48 - protein, 11 aa, Artificial Sequence
  Artificial Peptide
GSDPACYEFLW

SEQ ID NO: 49 - protein, 9 aa, Artificial Sequence
  Artificial Peptide
GSVVGNWQY

SEQ ID NO: 50 - protein, 10 aa, Artificial Sequence
  Artificial Peptide
GSVVGNWQYF

SEQ ID NO: 51 - protein, 11 aa, Artificial Sequence
  Artificial Peptide
GSVVGNWQYFF

SEQ ID NO: 52 - protein, 10 aa, Artificial Sequence
  Artificial Peptide
HISYPPLHEW

SEQ ID NO: 53 - protein, 9 aa, Artificial Sequence
  Artificial Peptide
ISGGPHISY

SEQ ID NO: 54 - protein, 9 aa, Artificial Sequence
  Artificial Peptide
ISYPPLHEW

SEQ ID NO: 55 - protein, 10 aa, Artificial Sequence
  Artificial Peptide
KISGGPHISY

SEQ ID NO: 56 - protein, 8 aa, Artificial Sequence
  Artificial Peptide
KVAELVHF

SEQ ID NO: 57 - protein, 11 aa, Artificial Sequence
  Artificial Peptide
LLTQHFVQENY

SEQ ID NO: 58 - protein, 11 aa, Artificial Sequence
  Artificial Peptide
LMEVDPIGHLY

SEQ ID NO: 59 - protein, 11 aa, Artificial Sequence
  Artificial Peptide
LSRKVAELVHF

SEQ ID NO: 60 - protein, 10 aa, Artificial Sequence
  Artificial Peptide
LTQHFVQENY

SEQ ID NO: 61 - protein, 9 aa, Artificial Sequence
  Artificial Peptide
LVHFLLLKY

SEQ ID NO: 62 - protein, 9 aa, Artificial Sequence
  Artificial Peptide
MLGSVVGNW

SEQ ID NO: 63 - protein, 11 aa, Artificial Sequence
  Artificial Peptide
MLGSVVGNWQY

SEQ ID NO: 64 - protein, 8 aa, Artificial Sequence
  Artificial Peptide
PIGHLYIF

SEQ ID NO: 65 - protein, 11 aa, Artificial Sequence
  Artificial Peptide
PSTFPDLESEF

SEQ ID NO: 66 - protein, 9 aa, Artificial Sequence
  Artificial Peptide
PTTMNYPLW

SEQ ID NO: 67 - protein, 10 aa, Artificial Sequence
  Artificial Peptide
QVPGSDPACY

SEQ ID NO: 68 - protein, 8 aa, Artificial Sequence
  Artificial Peptide
SLPTTMNY

SEQ ID NO: 69 - protein, 11 aa, Artificial Sequence
  Artificial Peptide
SLPTTMNYPLW

SEQ ID NO: 70 - protein, 9 aa, Artificial Sequence
  Artificial Peptide
SSLPTTMNY

SEQ ID NO: 71 - protein, 8 aa, Artificial Sequence
  Artificial Peptide
SSSLQLVF

SEQ ID NO: 72 - protein, 10 aa, Artificial Sequence
  Artificial Peptide
STFPDLESEF

SEQ ID NO: 73 - protein, 8 aa, Artificial Sequence
  Artificial Peptide
SVVGNWQY

SEQ ID NO: 74 - protein, 9 aa, Artificial Sequence
  Artificial Peptide
SVVGNWQYF

SEQ ID NO: 75 - protein, 10 aa, Artificial Sequence
  Artificial Peptide
SVVGNWQYFF

SEQ ID NO: 76 - protein, 11 aa, Artificial Sequence
  Artificial Peptide
TMNYPLWSQSY

SEQ ID NO: 77 - protein, 8 aa, Artificial Sequence
  Artificial Peptide
TTMNYPLW

SEQ ID NO: 78 - protein, 8 aa, Artificial Sequence
  Artificial Peptide
VVGNWQYF

SEQ ID NO: 79 - protein, 9 aa, Artificial Sequence
  Artificial Peptide
VVGNWQYFF

SEQ ID NO: 80 - protein, 11 aa, Artificial Sequence
  Artificial Peptide
YIFATCLGLSY

SEQ ID NO: 81 - protein, 8 aa, Artificial Sequence
  Artificial Peptide
AAISRKMV

SEQ ID NO: 82 - protein, 10 aa, Artificial Sequence
  Artificial Peptide
AAISRKMVEL

SEQ ID NO: 83 - protein, 11 aa, Artificial Sequence
  Artificial Peptide
AAISRKMVELV

SEQ ID NO: 84 - protein, 10 aa, Artificial Sequence
  Artificial Peptide
AIIAIEGDCA

SEQ ID NO: 85 - protein, 9 aa, Artificial Sequence
  Artificial Peptide
AISRKMVEL

SEQ ID NO: 86 - protein, 10 aa, Artificial Sequence
  Artificial Peptide
AISRKMVELV

SEQ ID NO: 87 - protein, 9 aa, Artificial Sequence
  Artificial Peptide
ALGLVGAQA

SEQ ID NO: 88 - protein, 11 aa, Artificial Sequence
  Artificial Peptide
ALGLVGAQAPA

SEQ ID NO: 89 - protein, 8 aa, Artificial Sequence
  Artificial Peptide
ALIETSYV

SEQ ID NO: 90 - protein, 10 aa, Artificial Sequence
  Artificial Peptide
ALIETSYVKV

SEQ ID NO: 91 - protein, 11 aa, Artificial Sequence
  Artificial Peptide
ALIETSYVKVL

SEQ ID NO: 92 - protein, 11 aa, Artificial Sequence
  Artificial Peptide
AQAPATEEQQT

SEQ ID NO: 93 - protein, 8 aa, Artificial Sequence
  Artificial Peptide
ATEEQQTA

SEQ ID NO: 94 - protein, 11 aa, Artificial Sequence
  Artificial Peptide
CAPEEKIWEEL

SEQ ID NO: 95 - protein, 9 aa, Artificial Sequence
  Artificial Peptide
CLGLSYDGL

SEQ ID NO: 96 - protein, 10 aa, Artificial Sequence
  Artificial Peptide
CLGLSYDGLL

SEQ ID NO: 97 - protein, 8 aa, Artificial Sequence
  Artificial Peptide
CQDFFPVI

SEQ ID NO: 98 - protein, 8 aa, Artificial Sequence
  Artificial Peptide
DLESEFQA

SEQ ID NO: 99 - protein, 9 aa, Artificial Sequence
  Artificial Peptide
DLESEFQAA

SEQ ID NO: 100 - protein, 10 aa, Artificial Sequence
  Artificial Peptide
DLESEFQAAI

SEQ ID NO: 101 - protein, 8 aa, Artificial Sequence
  Artificial Peptide
DLVQENYL

SEQ ID NO: 102 - protein, 8 aa, Artificial Sequence
  Artificial Peptide
EALGLVGA

SEQ ID NO: 103 - protein, 10 aa, Artificial Sequence
  Artificial Peptide
EALGLVGAQA

SEQ ID NO: 104 - protein, 9 aa, Artificial Sequence
  Artificial Peptide
EARGEALGL

SEQ ID NO: 105 - protein, 10 aa, Artificial Sequence
  Artificial Peptide
EARGEALGLV

SEQ ID NO: 106 - protein, 8 aa, Artificial Sequence
  Artificial Peptide
ELVHFLLL

SEQ ID NO: 107 - protein, 10 aa, Artificial Sequence
  Artificial Peptide
EQQTASSSST

SEQ ID NO: 108 - protein, 11 aa, Artificial Sequence
  Artificial Peptide
EQQTASSSSTL

SEQ ID NO: 109 - protein, 8 aa, Artificial Sequence
  Artificial Peptide
ETSYVKVL

SEQ ID NO: 110 - protein, 11 aa, Artificial Sequence
  Artificial Peptide
ETSYVKVLHHT

SEQ ID NO: 111 - protein, 10 aa, Artificial Sequence
  Artificial Peptide
EVFEGREDSV

SEQ ID NO: 112 - protein, 9 aa, Artificial Sequence
  Artificial Peptide
EVTLGEVPA

SEQ ID NO: 113 - protein, 10 aa, Artificial Sequence
  Artificial Peptide
EVTLGEVPAA

SEQ ID NO: 114 - protein, 8 aa, Artificial Sequence
  Artificial Peptide
EVVEVVPI

SEQ ID NO: 115 - protein, 11 aa, Artificial Sequence
  Artificial Peptide
EVVEVVPISHL

SEQ ID NO: 116 - protein, 8 aa, Artificial Sequence
  Artificial Peptide
EVVPISHL

SEQ ID NO: 117 - protein, 10 aa, Artificial Sequence
  Artificial Peptide
EVVPISHLYI

SEQ ID NO: 118 - protein, 11 aa, Artificial Sequence
  Artificial Peptide
EVVPISHLYIL

SEQ ID NO: 119 - protein, 8 aa, Artificial Sequence
  Artificial Peptide
FAHPRKLL

SEQ ID NO: 120 - protein, 9 aa, Artificial Sequence
  Artificial Peptide
FAHPRKLLM

SEQ ID NO: 121 - protein, 8 aa, Artificial Sequence
  Artificial Peptide
FLLLKYRA

SEQ ID NO: 122 - protein, 8 aa, Artificial Sequence
  Artificial Peptide
FLWGPRAL

SEQ ID NO: 123 - protein, 9 aa, Artificial Sequence
  Artificial Peptide
FLWGPRALI

SEQ ID NO: 124 - protein, 11 aa, Artificial Sequence
  Artificial Peptide
FLWGPRALIET

SEQ ID NO: 125 - protein, 9 aa, Artificial Sequence
  Artificial Peptide
FQAAISRKM

SEQ ID NO: 126 - protein, 10 aa, Artificial Sequence
  Artificial Peptide
FQAAISRKMV

SEQ ID NO: 127 - protein, 8 aa, Artificial Sequence
  Artificial Peptide
GASSFSTT

SEQ ID NO: 128 - protein, 9 aa, Artificial Sequence
  Artificial Peptide
GASSFSTTI

SEQ ID NO: 129 - protein, 8 aa, Artificial Sequence
  Artificial Peptide
GIEVVEVV

SEQ ID NO: 130 - protein, 10 aa, Artificial Sequence
  Artificial Peptide
GIEVVEVVPI

SEQ ID NO: 131 - protein, 8 aa, Artificial Sequence
  Artificial Peptide
GLEARGEA

SEQ ID NO: 132 - protein, 9 aa, Artificial Sequence
  Artificial Peptide
GLEARGEAL

SEQ ID NO: 133 - protein, 11 aa, Artificial Sequence
  Artificial Peptide
GLEARGEALGL

SEQ ID NO: 134 - protein, 8 aa, Artificial Sequence
  Artificial Peptide
GLLGDNQV

SEQ ID NO: 135 - protein, 9 aa, Artificial Sequence
  Artificial Peptide
GLLGDNQVM

SEQ ID NO: 136 - protein, 8 aa, Artificial Sequence
  Artificial Peptide
GLLIIVLA

SEQ ID NO: 137 - protein, 9 aa, Artificial Sequence
  Artificial Peptide
GLLIIVLAI

SEQ ID NO: 138 - protein, 10 aa, Artificial Sequence
  Artificial Peptide
GLLIIVLAII

SEQ ID NO: 139 - protein, 11 aa, Artificial Sequence
  Artificial Peptide
GLLIIVLAIIA

SEQ ID NO: 140 - protein, 8 aa, Artificial Sequence
  Artificial Peptide
GLSYDGLL

SEQ ID NO: 141 - protein, 9 aa, Artificial Sequence
  Artificial Peptide
GLVGAQAPA

SEQ ID NO: 142 - protein, 10 aa, Artificial Sequence
  Artificial Peptide
GLVGAQAPAT

SEQ ID NO: 143 - protein, 11 aa, Artificial Sequence
  Artificial Peptide
HISYPPLHERA

SEQ ID NO: 144 - protein, 9 aa, Artificial Sequence
  Artificial Peptide
HLYILVTCL

SEQ ID NO: 145 - protein, 11 aa, Artificial Sequence
  Artificial Peptide
HLYILVTCLGL

SEQ ID NO: 146 - protein, 11 aa, Artificial Sequence
  Artificial Peptide
HTLKIGGEPHI

SEQ ID NO: 147 - protein, 8 aa, Artificial Sequence
  Artificial Peptide
IAIEGDCA

SEQ ID NO: 148 - protein, 9 aa, Artificial Sequence
  Artificial Peptide
IIAIEGDCA

SEQ ID NO: 149 - protein, 8 aa, Artificial Sequence
  Artificial Peptide
IIVLAIIA

SEQ ID NO: 150 - protein, 9 aa, Artificial Sequence
  Artificial Peptide
IIVLAIIAI

SEQ ID NO: 151 - protein, 8 aa, Artificial Sequence
  Artificial Peptide
ILVTCLGL

SEQ ID NO: 152 - protein, 8 aa, Artificial Sequence
  Artificial Peptide
IVLAIIAI

SEQ ID NO: 153 - protein, 8 aa, Artificial Sequence
  Artificial Peptide
KAEMLESV

SEQ ID NO: 154 - protein, 9 aa, Artificial Sequence
  Artificial Peptide
KAEMLESVL

SEQ ID NO: 155 - protein, 8 aa, Artificial Sequence
  Artificial Peptide
KASEYLQL

SEQ ID NO: 156 - protein, 9 aa, Artificial Sequence
  Artificial Peptide
KASEYLQLV

SEQ ID NO: 157 - protein, 8 aa, Artificial Sequence
  Artificial Peptide
KIGGEPHI

SEQ ID NO: 158 - protein, 8 aa, Artificial Sequence
  Artificial Peptide
KIWEELSM

SEQ ID NO: 159 - protein, 9 aa, Artificial Sequence
  Artificial Peptide
KIWEELSML

SEQ ID NO: 160 - protein, 11 aa, Artificial Sequence
  Artificial Peptide
KIWEELSMLEV

SEQ ID NO: 161 - protein, 8 aa, Artificial Sequence
  Artificial Peptide
KLLMQDLV

SEQ ID NO: 162 - protein, 9 aa, Artificial Sequence
  Artificial Peptide
KMVELVHFL

SEQ ID NO: 163 - protein, 10 aa, Artificial Sequence
  Artificial Peptide
KMVELVHFLL

SEQ ID NO: 164 - protein, 11 aa, Artificial Sequence
  Artificial Peptide
KMVELVHFLLL

SEQ ID NO: 165 - protein, 8 aa, Artificial Sequence
  Artificial Peptide
KTGLLIIV

SEQ ID NO: 166 - protein, 9 aa, Artificial Sequence
  Artificial Peptide
KTGLLIIVL

SEQ ID NO: 167 - protein, 10 aa, Artificial Sequence
  Artificial Peptide
KTGLLIIVLA

SEQ ID NO: 168 - protein, 11 aa, Artificial Sequence
  Artificial Peptide
KTGLLIIVLAI

SEQ ID NO: 169 - protein, 9 aa, Artificial Sequence
  Artificial Peptide
KVLHHTLKI

SEQ ID NO: 170 - protein, 11 aa, Artificial Sequence
  Artificial Peptide
LAIIAIEGDCA

SEQ ID NO: 171 - protein, 9 aa, Artificial Sequence
  Artificial Peptide
LIETSYVKV

SEQ ID NO: 172 - protein, 10 aa, Artificial Sequence
  Artificial Peptide
LIETSYVKVL

SEQ ID NO: 173 - protein, 8 aa, Artificial Sequence
  Artificial Peptide
LIIVLAII

SEQ ID NO: 174 - protein, 9 aa, Artificial Sequence
  Artificial Peptide
LIIVLAIIA

SEQ ID NO: 175 - protein, 10 aa, Artificial Sequence
  Artificial Peptide
LIIVLAIIAI

SEQ ID NO: 176 - protein, 8 aa, Artificial Sequence
  Artificial Peptide
LLGDNQVM

SEQ ID NO: 177 - protein, 11 aa, Artificial Sequence
  Artificial Peptide
LLGDNQVMPKT

SEQ ID NO: 178 - protein, 8 aa, Artificial Sequence
  Artificial Peptide
LLIIVLAI

SEQ ID NO: 179 - protein, 9 aa, Artificial Sequence
  Artificial Peptide
LLIIVLAII

SEQ ID NO: 180 - protein, 10 aa, Artificial Sequence
  Artificial Peptide
LLIIVLAIIA

SEQ ID NO: 181 - protein, 11 aa, Artificial Sequence
  Artificial Peptide
LLIIVLAIIAI

SEQ ID NO: 182 - protein, 10 aa, Artificial Sequence
  Artificial Peptide
LLKYRAREPV

SEQ ID NO: 183 - protein, 11 aa, Artificial Sequence
  Artificial Peptide
LLKYRAREPVT

SEQ ID NO: 184 - protein, 11 aa, Artificial Sequence
  Artificial Peptide
LLLKYRAREPV

SEQ ID NO: 185 - protein, 11 aa, Artificial Sequence
  Artificial Peptide
LMQDLVQENYL

SEQ ID NO: 186 - protein, 9 aa, Artificial Sequence
  Artificial Peptide
LQLVFGIEV

SEQ ID NO: 187 - protein, 10 aa, Artificial Sequence
  Artificial Peptide
LQLVFGIEVV

SEQ ID NO: 188 - protein, 9 aa, Artificial Sequence
  Artificial Peptide
LVEVTLGEV

SEQ ID NO: 189 - protein, 11 aa, Artificial Sequence
  Artificial Peptide
LVEVTLGEVPA

SEQ ID NO: 190 - protein, 8 aa, Artificial Sequence
  Artificial Peptide
LVFGIEVV

SEQ ID NO: 191 - protein, 10 aa, Artificial Sequence
  Artificial Peptide
LVFGIEVVEV

SEQ ID NO: 192 - protein, 11 aa, Artificial Sequence
  Artificial Peptide
LVFGIEVVEVV

SEQ ID NO: 193 - protein, 8 aa, Artificial Sequence
  Artificial Peptide
LVGAQAPA

SEQ ID NO: 194 - protein, 9 aa, Artificial Sequence
  Artificial Peptide
LVGAQAPAT

SEQ ID NO: 195 - protein, 11 aa, Artificial Sequence
  Artificial Peptide
LVHFLLLKYRA

SEQ ID NO: 196 - protein, 10 aa, Artificial Sequence
  Artificial Peptide
MQDLVQENYL

SEQ ID NO: 197 - protein, 8 aa, Artificial Sequence
  Artificial Peptide
MVELVHFL

SEQ ID NO: 198 - protein, 9 aa, Artificial Sequence
  Artificial Peptide
MVELVHFLL

SEQ ID NO: 199 - protein, 10 aa, Artificial Sequence
  Artificial Peptide
MVELVHFLLL

SEQ ID NO: 200 - protein, 9 aa, Artificial Sequence
  Artificial Peptide
NQEEEGPRM

SEQ ID NO: 201 - protein, 9 aa, Artificial Sequence
  Artificial Peptide
NQVMPKTGL

SEQ ID NO: 202 - protein, 10 aa, Artificial Sequence
  Artificial Peptide
NQVMPKTGLL

SEQ ID NO: 203 - protein, 11 aa, Artificial Sequence
  Artificial Peptide
NQVMPKTGLLI

SEQ ID NO: 204 - protein, 8 aa, Artificial Sequence
  Artificial Peptide
PATEEQQT

SEQ ID NO: 205 - protein, 9 aa, Artificial Sequence
  Artificial Peptide
PATEEQQTA

SEQ ID NO: 206 - protein, 8 aa, Artificial Sequence
  Artificial Peptide
PISHLYIL

SEQ ID NO: 207 - protein, 9 aa, Artificial Sequence
  Artificial Peptide
PISHLYILV

SEQ ID NO: 208 - protein, 10 aa, Artificial Sequence
  Artificial Peptide
PISHLYILVT

SEQ ID NO: 209 - protein, 9 aa, Artificial Sequence
  Artificial Peptide
PQGASSFST

SEQ ID NO: 210 - protein, 10 aa, Artificial Sequence
  Artificial Peptide
PQGASSFSTT

SEQ ID NO: 211 - protein, 11 aa, Artificial Sequence
  Artificial Peptide
PQGASSFSTTI

SEQ ID NO: 212 - protein, 11 aa, Artificial Sequence
  Artificial Peptide
PVIFSKASEYL

SEQ ID NO: 213 - protein, 8 aa, Artificial Sequence
  Artificial Peptide
PVTKAEML

SEQ ID NO: 214 - protein, 11 aa, Artificial Sequence
  Artificial Peptide
PVTKAEMLESV

SEQ ID NO: 215 - protein, 8 aa, Artificial Sequence
  Artificial Peptide
QAAISRKM

SEQ ID NO: 216 - protein, 9 aa, Artificial Sequence
  Artificial Peptide
QAAISRKMV

SEQ ID NO: 217 - protein, 11 aa, Artificial Sequence
  Artificial Peptide
QAAISRKMVEL

SEQ ID NO: 218 - protein, 10 aa, Artificial Sequence
  Artificial Peptide
QAPATEEQQT

SEQ ID NO: 219 - protein, 11 aa, Artificial Sequence
  Artificial Peptide
QAPATEEQQTA

SEQ ID NO: 220 - protein, 8 aa, Artificial Sequence
  Artificial Peptide
QLVFGIEV

SEQ ID NO: 221 - protein, 9 aa, Artificial Sequence
  Artificial Peptide
QLVFGIEVV

SEQ ID NO: 222 - protein, 11 aa, Artificial Sequence
  Artificial Peptide
QLVFGIEVVEV

SEQ ID NO: 223 - protein, 9 aa, Artificial Sequence
  Artificial Peptide
QQTASSSST

SEQ ID NO: 224 - protein, 10 aa, Artificial Sequence
  Artificial Peptide
QQTASSSSTL

SEQ ID NO: 225 - protein, 11 aa, Artificial Sequence
  Artificial Peptide
QQTASSSSTLV

SEQ ID NO: 226 - protein, 8 aa, Artificial Sequence
  Artificial Peptide
QTASSSST

SEQ ID NO: 227 - protein, 9 aa, Artificial Sequence
  Artificial Peptide
QTASSSSTL

SEQ ID NO: 228 - protein, 10 aa, Artificial Sequence
  Artificial Peptide
QTASSSSTLV

SEQ ID NO: 229 - protein, 8 aa, Artificial Sequence
  Artificial Peptide
QVMPKTGL

SEQ ID NO: 230 - protein, 9 aa, Artificial Sequence
  Artificial Peptide
QVMPKTGLL

SEQ ID NO: 231 - protein, 10 aa, Artificial Sequence
  Artificial Peptide
QVMPKTGLLI

SEQ ID NO: 232 - protein, 11 aa, Artificial Sequence
  Artificial Peptide
QVMPKTGLLII

SEQ ID NO: 233 - protein, 8 aa, Artificial Sequence
  Artificial Peptide
QVPGSDPA

SEQ ID NO: 234 - protein, 9 aa, Artificial Sequence
  Artificial Peptide
RALIETSYV

SEQ ID NO: 235 - protein, 11 aa, Artificial Sequence
  Artificial Peptide
RALIETSYVKV

SEQ ID NO: 236 - protein, 9 aa, Artificial Sequence
  Artificial Peptide
RAREPVTKA

SEQ ID NO: 237 - protein, 11 aa, Artificial Sequence
  Artificial Peptide
RAREPVTKAEM

SEQ ID NO: 238 - protein, 9 aa, Artificial Sequence
  Artificial Peptide
RQVPGSDPA

SEQ ID NO: 239 - protein, 10 aa, Artificial Sequence
  Artificial Peptide
SQHCKPEEGL

SEQ ID NO: 240 - protein, 8 aa, Artificial Sequence
  Artificial Peptide
STLVEVTL

SEQ ID NO: 241 - protein, 11 aa, Artificial Sequence
  Artificial Peptide
STLVEVTLGEV

SEQ ID NO: 242 - protein, 8 aa, Artificial Sequence
  Artificial Peptide
STTINYTL

SEQ ID NO: 243 - protein, 9 aa, Artificial Sequence
  Artificial Peptide
SVFAHPRKL

SEQ ID NO: 244 - protein, 10 aa, Artificial Sequence
  Artificial Peptide
SVFAHPRKLL

SEQ ID NO: 245 - protein, 11 aa, Artificial Sequence
  Artificial Peptide
SVFAHPRKLLM

SEQ ID NO: 246 - protein, 8 aa, Artificial Sequence
  Artificial Peptide
TASSSSTL

SEQ ID NO: 247 - protein, 9 aa, Artificial Sequence
  Artificial Peptide
TASSSSTLV

SEQ ID NO: 248 - protein, 11 aa, Artificial Sequence
  Artificial Peptide
TASSSSTLVEV

SEQ ID NO: 249 - protein, 8 aa, Artificial Sequence
  Artificial Peptide
TLGEVPAA

SEQ ID NO: 250 - protein, 10 aa, Artificial Sequence
  Artificial Peptide
TLKIGGEPHI

SEQ ID NO: 251 - protein, 10 aa, Artificial Sequence
  Artificial Peptide
TLVEVTLGEV

SEQ ID NO: 252 - protein, 10 aa, Artificial Sequence
  Artificial Peptide
VIFSKASEYL

SEQ ID NO: 253 - protein, 8 aa, Artificial Sequence
  Artificial Peptide
VLHHTLKI

SEQ ID NO: 254 - protein, 11 aa, Artificial Sequence
  Artificial Peptide
VLRNCQDFFPV

SEQ ID NO: 255 - protein, 8 aa, Artificial Sequence
  Artificial Peptide
VMPKTGLL

SEQ ID NO: 256 - protein, 9 aa, Artificial Sequence
  Artificial Peptide
VMPKTGLLI

SEQ ID NO: 257 - protein, 10 aa, Artificial Sequence
  Artificial Peptide
VMPKTGLLII

SEQ ID NO: 258 - protein, 11 aa, Artificial Sequence
  Artificial Peptide
VMPKTGLLIIV

SEQ ID NO: 259 - protein, 11 aa, Artificial Sequence
  Artificial Peptide
VQENYLEYRQV

SEQ ID NO: 260 - protein, 11 aa, Artificial Sequence
  Artificial Peptide
VTCLGLSYDGL

SEQ ID NO: 261 - protein, 10 aa, Artificial Sequence
  Artificial Peptide
VTKAEMLESV

SEQ ID NO: 262 - protein, 11 aa, Artificial Sequence
  Artificial Peptide
VTKAEMLESVL

SEQ ID NO: 263 - protein, 8 aa, Artificial Sequence
  Artificial Peptide
VTLGEVPA

SEQ ID NO: 264 - protein, 9 aa, Artificial Sequence
  Artificial Peptide
VTLGEVPAA

SEQ ID NO: 265 - protein, 10 aa, Artificial Sequence
  Artificial Peptide
VVEVVPISHL

SEQ ID NO: 266 - protein, 9 aa, Artificial Sequence
  Artificial Peptide
VVPISHLYI

SEQ ID NO: 267 - protein, 10 aa, Artificial Sequence
  Artificial Peptide
VVPISHLYIL

SEQ ID NO: 268 - protein, 11 aa, Artificial Sequence
  Artificial Peptide
VVPISHLYILV

SEQ ID NO: 269 - protein, 9 aa, Artificial Sequence
  Artificial Peptide
YILVTCLGL

SEQ ID NO: 270 - protein, 8 aa, Artificial Sequence
  Artificial Peptide
YLQLVFGI

SEQ ID NO: 271 - protein, 10 aa, Artificial Sequence
  Artificial Peptide
YLQLVFGIEV

SEQ ID NO: 272 - protein, 11 aa, Artificial Sequence
  Artificial Peptide
YLQLVFGIEVV

SEQ ID NO: 273 - protein, 8 aa, Artificial Sequence
  Artificial Peptide
YVKVLHHT

SEQ ID NO: 274 - protein, 9 aa, Artificial Sequence
  Artificial Peptide
YVKVLHHTL

SEQ ID NO: 275 - protein, 11 aa, Artificial Sequence
  Artificial Peptide
YVKVLHHTLKI

SEQ ID NO: 276 - protein, 8 aa, Artificial Sequence
  Artificial Peptide
AALSRKVA

SEQ ID NO: 277 - protein, 10 aa, Artificial Sequence
  Artificial Peptide
AALSRKVAEL

SEQ ID NO: 278 - protein, 11 aa, Artificial Sequence
  Artificial Peptide
AALSRKVAELV

SEQ ID NO: 279 - protein, 8 aa, Artificial Sequence
  Artificial Peptide
AASSSSTL

SEQ ID NO: 280 - protein, 9 aa, Artificial Sequence
  Artificial Peptide
AASSSSTLV

SEQ ID NO: 281 - protein, 11 aa, Artificial Sequence
  Artificial Peptide
AASSSSTLVEV

SEQ ID NO: 282 - protein, 10 aa, Artificial Sequence
  Artificial Peptide
AIIAREGDCA

SEQ ID NO: 283 - protein, 9 aa, Artificial Sequence
  Artificial Peptide
ALGLVGAQA

SEQ ID NO: 284 - protein, 11 aa, Artificial Sequence
  Artificial Peptide
ALGLVGAQAPA

SEQ ID NO: 285 - protein, 9 aa, Artificial Sequence
  Artificial Peptide
ALSRKVAEL

SEQ ID NO: 286 - protein, 10 aa, Artificial Sequence
  Artificial Peptide
ALSRKVAELV

SEQ ID NO: 287 - protein, 8 aa, Artificial Sequence
  Artificial Peptide
ALVETSYV

SEQ ID NO: 288 - protein, 10 aa, Artificial Sequence
  Artificial Peptide
ALVETSYVKV

SEQ ID NO: 289 - protein, 11 aa, Artificial Sequence
  Artificial Peptide
ALVETSYVKVL

SEQ ID NO: 290 - protein, 11 aa, Artificial Sequence
  Artificial Peptide
AQAPATEEQEA

SEQ ID NO: 291 - protein, 11 aa, Artificial Sequence
  Artificial Peptide
ATCLGLSYDGL

SEQ ID NO: 292 - protein, 8 aa, Artificial Sequence
  Artificial Peptide
ATEEQEAA

SEQ ID NO: 293 - protein, 11 aa, Artificial Sequence
  Artificial Peptide
CAPEEKIWEEL

SEQ ID NO: 294 - protein, 9 aa, Artificial Sequence
  Artificial Peptide
CLGLSYDGL

SEQ ID NO: 295 - protein, 10 aa, Artificial Sequence
  Artificial Peptide
CLGLSYDGLL

SEQ ID NO: 296 - protein, 8 aa, Artificial Sequence
  Artificial Peptide
DLESEFQA

SEQ ID NO: 297 - protein, 9 aa, Artificial Sequence
  Artificial Peptide
DLESEFQAA

SEQ ID NO: 298 - protein, 10 aa, Artificial Sequence
  Artificial Peptide
DLESEFQAAL

SEQ ID NO: 299 - protein, 8 aa, Artificial Sequence
  Artificial Peptide
EAASSSST

SEQ ID NO: 300 - protein, 9 aa, Artificial Sequence
  Artificial Peptide
EAASSSSTL

SEQ ID NO: 301 - protein, 10 aa, Artificial Sequence
  Artificial Peptide
EAASSSSTLV

SEQ ID NO: 302 - protein, 8 aa, Artificial Sequence
  Artificial Peptide
EALGLVGA

SEQ ID NO: 303 - protein, 10 aa, Artificial Sequence
  Artificial Peptide
EALGLVGAQA

SEQ ID NO: 304 - protein, 9 aa, Artificial Sequence
  Artificial Peptide
EARGEALGL

SEQ ID NO: 305 - protein, 10 aa, Artificial Sequence
  Artificial Peptide
EARGEALGLV

SEQ ID NO: 306 - protein, 8 aa, Artificial Sequence
  Artificial Peptide
ELMEVDPI

SEQ ID NO: 307 - protein, 11 aa, Artificial Sequence
  Artificial Peptide
ELMEVDPIGHL

SEQ ID NO: 308 - protein, 8 aa, Artificial Sequence
  Artificial Peptide
ELVHFLLL

SEQ ID NO: 309 - protein, 10 aa, Artificial Sequence
  Artificial Peptide
EQEAASSSST

SEQ ID NO: 310 - protein, 11 aa, Artificial Sequence
  Artificial Peptide
EQEAASSSSTL

SEQ ID NO: 311 - protein, 8 aa, Artificial Sequence
  Artificial Peptide
ETSYVKVL

SEQ ID NO: 312 - protein, 11 aa, Artificial Sequence
  Artificial Peptide
ETSYVKVLHHM

SEQ ID NO: 313 - protein, 8 aa, Artificial Sequence
  Artificial Peptide
EVDPIGHL

SEQ ID NO: 314 - protein, 10 aa, Artificial Sequence
  Artificial Peptide
EVDPIGHLYI

SEQ ID NO: 315 - protein, 10 aa, Artificial Sequence
  Artificial Peptide
EVFEGREDSI

SEQ ID NO: 316 - protein, 11 aa, Artificial Sequence
  Artificial Peptide
EVFEGREDSIL

SEQ ID NO: 317 - protein, 9 aa, Artificial Sequence
  Artificial Peptide
EVTLGEVPA

SEQ ID NO: 318 - protein, 10 aa, Artificial Sequence
  Artificial Peptide
EVTLGEVPAA

SEQ ID NO: 319 - protein, 8 aa, Artificial Sequence
  Artificial Peptide
FLLLKYRA

SEQ ID NO: 320 - protein, 8 aa, Artificial Sequence
  Artificial Peptide
FLWGPRAL

SEQ ID NO: 321 - protein, 9 aa, Artificial Sequence
  Artificial Peptide
FLWGPRALV

SEQ ID NO: 322 - protein, 11 aa, Artificial Sequence
  Artificial Peptide
FLWGPRALVET

SEQ ID NO: 323 - protein, 9 aa, Artificial Sequence
  Artificial Peptide
FQAALSRKV

SEQ ID NO: 324 - protein, 10 aa, Artificial Sequence
  Artificial Peptide
FQAALSRKVA

SEQ ID NO: 325 - protein, 8 aa, Artificial Sequence
  Artificial Peptide
GASSLPTT

SEQ ID NO: 326 - protein, 9 aa, Artificial Sequence
  Artificial Peptide
GASSLPTTM

SEQ ID NO: 327 - protein, 10 aa, Artificial Sequence
  Artificial Peptide
GIELMEVDPI

SEQ ID NO: 328 - protein, 8 aa, Artificial Sequence
  Artificial Peptide
GLEARGEA

SEQ ID NO: 329 - protein, 9 aa, Artificial Sequence
  Artificial Peptide
GLEARGEAL

SEQ ID NO: 330 - protein, 11 aa, Artificial Sequence
  Artificial Peptide
GLEARGEALGL

SEQ ID NO: 331 - protein, 8 aa, Artificial Sequence
  Artificial Peptide
GLLGDNQI

SEQ ID NO: 332 - protein, 9 aa, Artificial Sequence
  Artificial Peptide
GLLGDNQIM

SEQ ID NO: 333 - protein, 8 aa, Artificial Sequence
  Artificial Peptide
GLLIIVLA

SEQ ID NO: 334 - protein, 9 aa, Artificial Sequence
  Artificial Peptide
GLLIIVLAI

SEQ ID NO: 335 - protein, 10 aa, Artificial Sequence
  Artificial Peptide
GLLIIVLAII

SEQ ID NO: 336 - protein, 11 aa, Artificial Sequence
  Artificial Peptide
GLLIIVLAIIA

SEQ ID NO: 337 - protein, 8 aa, Artificial Sequence
  Artificial Peptide
GLSYDGLL

SEQ ID NO: 338 - protein, 9 aa, Artificial Sequence
  Artificial Peptide
GLVGAQAPA

SEQ ID NO: 339 - protein, 10 aa, Artificial Sequence
  Artificial Peptide
GLVGAQAPAT

SEQ ID NO: 340 - protein, 11 aa, Artificial Sequence
  Artificial Peptide
HISYPPLHEWV

SEQ ID NO: 341 - protein, 9 aa, Artificial Sequence
  Artificial Peptide
HLYIFATCL

SEQ ID NO: 342 - protein, 11 aa, Artificial Sequence
  Artificial Peptide
HLYIFATCLGL

SEQ ID NO: 343 - protein, 11 aa, Artificial Sequence
  Artificial Peptide
HMVKISGGPHI

SEQ ID NO: 344 - protein, 8 aa, Artificial Sequence
  Artificial Peptide
IAREGDCA

SEQ ID NO: 345 - protein, 9 aa, Artificial Sequence
  Artificial Peptide
IIAREGDCA

SEQ ID NO: 346 - protein, 8 aa, Artificial Sequence
  Artificial Peptide
IIVLAIIA

SEQ ID NO: 347 - protein, 8 aa, Artificial Sequence
  Artificial Peptide
ILGDPKKL

SEQ ID NO: 348 - protein, 9 aa, Artificial Sequence
  Artificial Peptide
ILGDPKKLL

SEQ ID NO: 349 - protein, 10 aa, Artificial Sequence
  Artificial Peptide
ILGDPKKLLT

SEQ ID NO: 350 - protein, 8 aa, Artificial Sequence
  Artificial Peptide
IMPKAGLL

SEQ ID NO: 351 - protein, 9 aa, Artificial Sequence
  Artificial Peptide
IMPKAGLLI

SEQ ID NO: 352 - protein, 10 aa, Artificial Sequence
  Artificial Peptide
IMPKAGLLII

SEQ ID NO: 353 - protein, 11 aa, Artificial Sequence
  Artificial Peptide
IMPKAGLLIIV

SEQ ID NO: 354 - protein, 8 aa, Artificial Sequence
  Artificial Peptide
KAEMLGSV

SEQ ID NO: 355 - protein, 9 aa, Artificial Sequence
  Artificial Peptide
KAEMLGSVV

SEQ ID NO: 356 - protein, 8 aa, Artificial Sequence
  Artificial Peptide
KAGLLIIV

SEQ ID NO: 357 - protein, 9 aa, Artificial Sequence
  Artificial Peptide
KAGLLIIVL

SEQ ID NO: 358 - protein, 10 aa, Artificial Sequence
  Artificial Peptide
KAGLLIIVLA

SEQ ID NO: 359 - protein, 11 aa, Artificial Sequence
  Artificial Peptide
KAGLLIIVLAI

SEQ ID NO: 360 - protein, 8 aa, Artificial Sequence
  Artificial Peptide
KASSSLQL

SEQ ID NO: 361 - protein, 9 aa, Artificial Sequence
  Artificial Peptide
KASSSLQLV

SEQ ID NO: 362 - protein, 8 aa, Artificial Sequence
  Artificial Peptide
KISGGPHI

SEQ ID NO: 363 - protein, 8 aa, Artificial Sequence
  Artificial Peptide
KIWEELSV

SEQ ID NO: 364 - protein, 9 aa, Artificial Sequence
  Artificial Peptide
KIWEELSVL

SEQ ID NO: 365 - protein, 11 aa, Artificial Sequence
  Artificial Peptide
KIWEELSVLEV

SEQ ID NO: 366 - protein, 8 aa, Artificial Sequence
  Artificial Peptide
KLLTQHFV

SEQ ID NO: 367 - protein, 9 aa, Artificial Sequence
  Artificial Peptide
KVAELVHFL

SEQ ID NO: 368 - protein, 10 aa, Artificial Sequence
  Artificial Peptide
KVAELVHFLL

SEQ ID NO: 369 - protein, 11 aa, Artificial Sequence
  Artificial Peptide
KVAELVHFLLL

SEQ ID NO: 370 - protein, 9 aa, Artificial Sequence
  Artificial Peptide
KVLHHMVKI

SEQ ID NO: 371 - protein, 11 aa, Artificial Sequence
  Artificial Peptide
LAIIAREGDCA

SEQ ID NO: 372 - protein, 8 aa, Artificial Sequence
  Artificial Peptide
LIIVLAII

SEQ ID NO: 373 - protein, 9 aa, Artificial Sequence
  Artificial Peptide
LIIVLAIIA

SEQ ID NO: 374 - protein, 8 aa, Artificial Sequence
  Artificial Peptide
LLGDNQIM

SEQ ID NO: 375 - protein, 11 aa, Artificial Sequence
  Artificial Peptide
LLGDNQIMPKA

SEQ ID NO: 376 - protein, 8 aa, Artificial Sequence
  Artificial Peptide
LLIIVLAI

SEQ ID NO: 377 - protein, 9 aa, Artificial Sequence
  Artificial Peptide
LLIIVLAII

SEQ ID NO: 378 - protein, 10 aa, Artificial Sequence
  Artificial Peptide
LLIIVLAIIA

SEQ ID NO: 379 - protein, 10 aa, Artificial Sequence
  Artificial Peptide
LLKYRAREPV

SEQ ID NO: 380 - protein, 11 aa, Artificial Sequence
  Artificial Peptide
LLKYRAREPVT

SEQ ID NO: 381 - protein, 11 aa, Artificial Sequence
  Artificial Peptide
LLLKYRAREPV

SEQ ID NO: 382 - protein, 10 aa, Artificial Sequence
  Artificial Peptide
LMEVDPIGHL

SEQ ID NO: 383 - protein, 9 aa, Artificial Sequence
  Artificial Peptide
LQLVFGIEL

SEQ ID NO: 384 - protein, 10 aa, Artificial Sequence
  Artificial Peptide
LQLVFGIELM

SEQ ID NO: 385 - protein, 11 aa, Artificial Sequence
  Artificial Peptide
LTQHFVQENYL

SEQ ID NO: 386 - protein, 9 aa, Artificial Sequence
  Artificial Peptide
LVETSYVKV

SEQ ID NO: 387 - protein, 10 aa, Artificial Sequence
  Artificial Peptide
LVETSYVKVL

SEQ ID NO: 388 - protein, 9 aa, Artificial Sequence
  Artificial Peptide
LVEVTLGEV

SEQ ID NO: 389 - protein, 11 aa, Artificial Sequence
  Artificial Peptide
LVEVTLGEVPA

SEQ ID NO: 390 - protein, 8 aa, Artificial Sequence
  Artificial Peptide
LVFGIELM

SEQ ID NO: 391 - protein, 10 aa, Artificial Sequence
  Artificial Peptide
LVFGIELMEV

SEQ ID NO: 392 - protein, 8 aa, Artificial Sequence
  Artificial Peptide
LVGAQAPA

SEQ ID NO: 393 - protein, 9 aa, Artificial Sequence
  Artificial Peptide
LVGAQAPAT

SEQ ID NO: 394 - protein, 11 aa, Artificial Sequence
  Artificial Peptide
LVHFLLLKYRA

SEQ ID NO: 395 - protein, 10 aa, Artificial Sequence
  Artificial Peptide
MVKISGGPHI

SEQ ID NO: 396 - protein, 9 aa, Artificial Sequence
  Artificial Peptide
NQEEEGPST

SEQ ID NO: 397 - protein, 9 aa, Artificial Sequence
  Artificial Peptide
NQIMPKAGL

SEQ ID NO: 398 - protein, 10 aa, Artificial Sequence
  Artificial Peptide
NQIMPKAGLL

SEQ ID NO: 399 - protein, 11 aa, Artificial Sequence
  Artificial Peptide
NQIMPKAGLLI

SEQ ID NO: 400 - protein, 8 aa, Artificial Sequence
  Artificial Peptide
PATEEQEA

SEQ ID NO: 401 - protein, 9 aa, Artificial Sequence
  Artificial Peptide
PATEEQEAA

SEQ ID NO: 402 - protein, 9 aa, Artificial Sequence
  Artificial Peptide
PIGHLYIFA

SEQ ID NO: 403 - protein, 10 aa, Artificial Sequence
  Artificial Peptide
PIGHLYIFAT

SEQ ID NO: 404 - protein, 9 aa, Artificial Sequence
  Artificial Peptide
PQGASSLPT

SEQ ID NO: 405 - protein, 10 aa, Artificial Sequence
  Artificial Peptide
PQGASSLPTT

SEQ ID NO: 406 - protein, 11 aa, Artificial Sequence
  Artificial Peptide
PQGASSLPTTM

SEQ ID NO: 407 - protein, 10 aa, Artificial Sequence
  Artificial Peptide
PQSPQGASSL

SEQ ID NO: 408 - protein, 8 aa, Artificial Sequence
  Artificial Peptide
PTTMNYPL

SEQ ID NO: 409 - protein, 11 aa, Artificial Sequence
  Artificial Peptide
PVIFSKASSSL

SEQ ID NO: 410 - protein, 8 aa, Artificial Sequence
  Artificial Peptide
PVTKAEML

SEQ ID NO: 411 - protein, 11 aa, Artificial Sequence
  Artificial Peptide
PVTKAEMLGSV

SEQ ID NO: 412 - protein, 8 aa, Artificial Sequence
  Artificial Peptide
QAALSRKV

SEQ ID NO: 413 - protein, 9 aa, Artificial Sequence
  Artificial Peptide
QAALSRKVA

SEQ ID NO: 414 - protein, 11 aa, Artificial Sequence
  Artificial Peptide
QAALSRKVAEL

SEQ ID NO: 415 - protein, 10 aa, Artificial Sequence
  Artificial Peptide
QAPATEEQEA

SEQ ID NO: 416 - protein, 11 aa, Artificial Sequence
  Artificial Peptide
QAPATEEQEAA

SEQ ID NO: 417 - protein, 8 aa, Artificial Sequence
  Artificial Peptide
QIMPKAGL

SEQ ID NO: 418 - protein, 9 aa, Artificial Sequence
  Artificial Peptide
QIMPKAGLL

SEQ ID NO: 419 - protein, 10 aa, Artificial Sequence
  Artificial Peptide
QIMPKAGLLI

SEQ ID NO: 420 - protein, 11 aa, Artificial Sequence
  Artificial Peptide
QIMPKAGLLII

SEQ ID NO: 421 - protein, 8 aa, Artificial Sequence
  Artificial Peptide
QLVFGIEL

SEQ ID NO: 422 - protein, 9 aa, Artificial Sequence
  Artificial Peptide
QLVFGIELM

SEQ ID NO: 423 - protein, 11 aa, Artificial Sequence
  Artificial Peptide
QLVFGIELMEV

SEQ ID NO: 424 - protein, 8 aa, Artificial Sequence
  Artificial Peptide
QVPGSDPA

SEQ ID NO: 425 - protein, 9 aa, Artificial Sequence
  Artificial Peptide
RALVETSYV

SEQ ID NO: 426 - protein, 11 aa, Artificial Sequence
  Artificial Peptide
RALVETSYVKV

SEQ ID NO: 427 - protein, 9 aa, Artificial Sequence
  Artificial Peptide
RAREPVTKA

SEQ ID NO: 428 - protein, 11 aa, Artificial Sequence
  Artificial Peptide
RAREPVTKAEM

SEQ ID NO: 429 - protein, 9 aa, Artificial Sequence
  Artificial Peptide
RQVPGSDPA

SEQ ID NO: 430 - protein, 9 aa, Artificial Sequence
  Artificial Peptide
SILGDPKKL

SEQ ID NO: 431 - protein, 10 aa, Artificial Sequence
  Artificial Peptide
SILGDPKKLL

SEQ ID NO: 432 - protein, 11 aa, Artificial Sequence
  Artificial Peptide
SILGDPKKLLT

SEQ ID NO: 433 - protein, 10 aa, Artificial Sequence
  Artificial Peptide
SLPTTMNYPL

SEQ ID NO: 434 - protein, 8 aa, Artificial Sequence
  Artificial Peptide
SLQLVFGI

SEQ ID NO: 435 - protein, 10 aa, Artificial Sequence
  Artificial Peptide
SLQLVFGIEL

SEQ ID NO: 436 - protein, 11 aa, Artificial Sequence
  Artificial Peptide
SLQLVFGIELM

SEQ ID NO: 437 - protein, 10 aa, Artificial Sequence
  Artificial Peptide
SQHCKPEEGL

SEQ ID NO: 438 - protein, 8 aa, Artificial Sequence
  Artificial Peptide
STLVEVTL

SEQ ID NO: 439 - protein, 11 aa, Artificial Sequence
  Artificial Peptide
STLVEVTLGEV

SEQ ID NO: 440 - protein, 8 aa, Artificial Sequence
  Artificial Peptide
TLGEVPAA

SEQ ID NO: 441 - protein, 10 aa, Artificial Sequence
  Artificial Peptide
TLVEVTLGEV

SEQ ID NO: 442 - protein, 10 aa, Artificial Sequence
  Artificial Peptide
TQHFVQENYL

SEQ ID NO: 443 - protein, 8 aa, Artificial Sequence
  Artificial Peptide
VAELVHFL

SEQ ID NO: 444 - protein, 9 aa, Artificial Sequence
  Artificial Peptide
VAELVHFLL

SEQ ID NO: 445 - protein, 10 aa, Artificial Sequence
  Artificial Peptide
VAELVHFLLL

SEQ ID NO: 446 - protein, 10 aa, Artificial Sequence
  Artificial Peptide
VIFSKASSSL

SEQ ID NO: 447 - protein, 8 aa, Artificial Sequence
  Artificial Peptide
VLHHMVKI

SEQ ID NO: 448 - protein, 11 aa, Artificial Sequence
  Artificial Peptide
VQENYLEYRQV

SEQ ID NO: 449 - protein, 10 aa, Artificial Sequence
  Artificial Peptide
VTKAEMLGSV

SEQ ID NO: 450 - protein, 11 aa, Artificial Sequence
  Artificial Peptide
VTKAEMLGSVV

SEQ ID NO: 451 - protein, 8 aa, Artificial Sequence
  Artificial Peptide
VTLGEVPA

SEQ ID NO: 452 - protein, 9 aa, Artificial Sequence
  Artificial Peptide
VTLGEVPAA

SEQ ID NO: 453 - protein, 11 aa, Artificial Sequence
  Artificial Peptide
VVGNWQYFFPV

SEQ ID NO: 454 - protein, 8 aa, Artificial Sequence
  Artificial Peptide
WQYFFPVI

SEQ ID NO: 455 - protein, 9 aa, Artificial Sequence
  Artificial Peptide
YIFATCLGL

SEQ ID NO: 456 - protein, 8 aa, Artificial Sequence
  Artificial Peptide
YVKVLHHM

SEQ ID NO: 457 - protein, 9 aa, Artificial Sequence
  Artificial Peptide
YVKVLHHMV

SEQ ID NO: 458 - protein, 11 aa, Artificial Sequence
  Artificial Peptide
YVKVLHHMVKI

SEQ ID NO: 459 - protein, 11 aa, Artificial Sequence
  Artificial Peptide
AIEGDCAPEEK

SEQ ID NO: 460 - protein, 9 aa, Artificial Sequence
  Artificial Peptide
ALIETSYVK

SEQ ID NO: 461 - protein, 11 aa, Artificial Sequence
  Artificial Peptide
DLVQENYLEYR

SEQ ID NO: 462 - protein, 8 aa, Artificial Sequence
  Artificial Peptide
DSVFAHPR

SEQ ID NO: 463 - protein, 9 aa, Artificial Sequence
  Artificial Peptide
DSVFAHPRK

SEQ ID NO: 464 - protein, 11 aa, Artificial Sequence
  Artificial Peptide
ELSMLEVFEGR

SEQ ID NO: 465 - protein, 9 aa, Artificial Sequence
  Artificial Peptide
ELVHFLLLK

SEQ ID NO: 466 - protein, 11 aa, Artificial Sequence
  Artificial Peptide
ELVHFLLLKYR

SEQ ID NO: 467 - protein, 8 aa, Artificial Sequence
  Artificial Peptide
EMLESVLR

SEQ ID NO: 468 - protein, 10 aa, Artificial Sequence
  Artificial Peptide
ESEFQAAISR

SEQ ID NO: 469 - protein, 11 aa, Artificial Sequence
  Artificial Peptide
ESEFQAAISRK

SEQ ID NO: 470 - protein, 9 aa, Artificial Sequence
  Artificial Peptide
FLLLKYRAR

SEQ ID NO: 471 - protein, 11 aa, Artificial Sequence
  Artificial Peptide
FSTTINYTLWR

SEQ ID NO: 472 - protein, 11 aa, Artificial Sequence
  Artificial Peptide
GLLGDNQVMPK

SEQ ID NO: 473 - protein, 11 aa, Artificial Sequence
  Artificial Peptide
GSSNQEEEGPR

SEQ ID NO: 474 - protein, 10 aa, Artificial Sequence
  Artificial Peptide
HISYPPLHER

SEQ ID NO: 475 - protein, 9 aa, Artificial Sequence
  Artificial Peptide
ISYPPLHER

SEQ ID NO: 476 - protein, 10 aa, Artificial Sequence
  Artificial Peptide
KAEMLESVLR

SEQ ID NO: 477 - protein, 8 aa, Artificial Sequence
  Artificial Peptide
KVLHHTLK

SEQ ID NO: 478 - protein, 8 aa, Artificial Sequence
  Artificial Peptide
LIETSYVK

SEQ ID NO: 479 - protein, 10 aa, Artificial Sequence
  Artificial Peptide
LLGDNQVMPK

SEQ ID NO: 480 - protein, 8 aa, Artificial Sequence
  Artificial Peptide
LLLKYRAR

SEQ ID NO: 481 - protein, 10 aa, Artificial Sequence
  Artificial Peptide
LSMLEVFEGR

SEQ ID NO: 482 - protein, 8 aa, Artificial Sequence
  Artificial Peptide
LVHFLLLK

SEQ ID NO: 483 - protein, 10 aa, Artificial Sequence
  Artificial Peptide
LVHFLLLKYR

SEQ ID NO: 484 - protein, 10 aa, Artificial Sequence
  Artificial Peptide
LVQENYLEYR

SEQ ID NO: 485 - protein, 8 aa, Artificial Sequence
  Artificial Peptide
MLEVFEGR

SEQ ID NO: 486 - protein, 11 aa, Artificial Sequence
  Artificial Peptide
MVELVHFLLLK

SEQ ID NO: 487 - protein, 11 aa, Artificial Sequence
  Artificial Peptide
PACYEFLWGPR

SEQ ID NO: 488 - protein, 10 aa, Artificial Sequence
  Artificial Peptide
PLEQRSQHCK

SEQ ID NO: 489 - protein, 8 aa, Artificial Sequence
  Artificial Peptide
PLHERALR

SEQ ID NO: 490 - protein, 10 aa, Artificial Sequence
  Artificial Peptide
RALIETSYVK

SEQ ID NO: 491 - protein, 8 aa, Artificial Sequence
  Artificial Peptide
RAREPVTK

SEQ ID NO: 492 - protein, 9 aa, Artificial Sequence
  Artificial Peptide
SMLEVFEGR

SEQ ID NO: 493 - protein, 10 aa, Artificial Sequence
  Artificial Peptide
SSNQEEEGPR

SEQ ID NO: 494 - protein, 10 aa, Artificial Sequence
  Artificial Peptide
STTINYTLWR

SEQ ID NO: 495 - protein, 8 aa, Artificial Sequence
  Artificial Peptide
SVFAHPRK

SEQ ID NO: 496 - protein, 8 aa, Artificial Sequence
  Artificial Peptide
TINYTLWR

SEQ ID NO: 497 - protein, 9 aa, Artificial Sequence
  Artificial Peptide
TTINYTLWR

SEQ ID NO: 498 - protein, 10 aa, Artificial Sequence
  Artificial Peptide
YVKVLHHTLK

SEQ ID NO: 499 - protein, 9 aa, Artificial Sequence
  Artificial Peptide
ALVETSYVK

SEQ ID NO: 500 - protein, 8 aa, Artificial Sequence
  Artificial Peptide
DSILGDPK

SEQ ID NO: 501 - protein, 9 aa, Artificial Sequence
  Artificial Peptide
DSILGDPKK

SEQ ID NO: 502 - protein, 11 aa, Artificial Sequence
  Artificial Peptide
ELSVLEVFEGR

SEQ ID NO: 503 - protein, 9 aa, Artificial Sequence
  Artificial Peptide
ELVHFLLLK

SEQ ID NO: 504 - protein, 11 aa, Artificial Sequence
  Artificial Peptide
ELVHFLLLKYR

SEQ ID NO: 505 - protein, 10 aa, Artificial Sequence
  Artificial Peptide
ESEFQAALSR

SEQ ID NO: 506 - protein, 11 aa, Artificial Sequence
  Artificial Peptide
ESEFQAALSRK

SEQ ID NO: 507 - protein, 9 aa, Artificial Sequence
  Artificial Peptide
FLLLKYRAR

SEQ ID NO: 508 - protein, 10 aa, Artificial Sequence
  Artificial Peptide
FVQENYLEYR

SEQ ID NO: 509 - protein, 11 aa, Artificial Sequence
  Artificial Peptide
GLLGDNQIMPK

SEQ ID NO: 510 - protein, 9 aa, Artificial Sequence
  Artificial Peptide
IIVLAIIAR

SEQ ID NO: 511 - protein, 8 aa, Artificial Sequence
  Artificial Peptide
IVLAIIAR

SEQ ID NO: 512 - protein, 8 aa, Artificial Sequence
  Artificial Peptide
KVLHHMVK

SEQ ID NO: 513 - protein, 10 aa, Artificial Sequence
  Artificial Peptide
LIIVLAIIAR

SEQ ID NO: 514 - protein, 10 aa, Artificial Sequence
  Artificial Peptide
LLGDNQIMPK

SEQ ID NO: 515 - protein, 11 aa, Artificial Sequence
  Artificial Peptide
LLIIVLAIIAR

SEQ ID NO: 516 - protein, 8 aa, Artificial Sequence
  Artificial Peptide
LLLKYRAR

SEQ ID NO: 517 - protein, 10 aa, Artificial Sequence
  Artificial Peptide
LSVLEVFEGR

SEQ ID NO: 518 - protein, 8 aa, Artificial Sequence
  Artificial Peptide
LVETSYVK

SEQ ID NO: 519 - protein, 8 aa, Artificial Sequence
  Artificial Peptide
LVHFLLLK

SEQ ID NO: 520 - protein, 10 aa, Artificial Sequence
  Artificial Peptide
LVHFLLLKYR

SEQ ID NO: 521 - protein, 11 aa, Artificial Sequence
  Artificial Peptide
PACYEFLWGPR

SEQ ID NO: 522 - protein, 10 aa, Artificial Sequence
  Artificial Peptide
PLEQRSQHCK

SEQ ID NO: 523 - protein, 8 aa, Artificial Sequence
  Artificial Peptide
PLHEWVLR

SEQ ID NO: 524 - protein, 10 aa, Artificial Sequence
  Artificial Peptide
RALVETSYVK

SEQ ID NO: 525 - protein, 8 aa, Artificial Sequence
  Artificial Peptide
RAREPVTK

SEQ ID NO: 526 - protein, 8 aa, Artificial Sequence
  Artificial Peptide
SILGDPKK

SEQ ID NO: 527 - protein, 9 aa, Artificial Sequence
  Artificial Peptide
SVLEVFEGR

SEQ ID NO: 528 - protein, 11 aa, Artificial Sequence
  Artificial Peptide
VAELVHFLLLK

SEQ ID NO: 529 - protein, 8 aa, Artificial Sequence
  Artificial Peptide
VLEVFEGR

SEQ ID NO: 530 - protein, 10 aa, Artificial Sequence
  Artificial Peptide
YVKVLHHMVK

SEQ ID NO: 531 - protein, 9 aa, Artificial Sequence
  Artificial Peptide
AISRKMVEL

SEQ ID NO: 532 - protein, 11 aa, Artificial Sequence
  Artificial Peptide
ALIETSYVKVL

SEQ ID NO: 533 - protein, 9 aa, Artificial Sequence
  Artificial Peptide
CLGLSYDGL

SEQ ID NO: 534 - protein, 10 aa, Artificial Sequence
  Artificial Peptide
CLGLSYDGLL

SEQ ID NO: 535 - protein, 11 aa, Artificial Sequence
  Artificial Peptide
CYEFLWGPRAL

SEQ ID NO: 536 - protein, 10 aa, Artificial Sequence
  Artificial Peptide
DLESEFQAAI

SEQ ID NO: 537 - protein, 8 aa, Artificial Sequence
  Artificial Peptide
DLVQENYL

SEQ ID NO: 538 - protein, 10 aa, Artificial Sequence
  Artificial Peptide
DLVQENYLEY

SEQ ID NO: 539 - protein, 9 aa, Artificial Sequence
  Artificial Peptide
EFLWGPRAL

SEQ ID NO: 540 - protein, 10 aa, Artificial Sequence
  Artificial Peptide
EFLWGPRALI

SEQ ID NO: 541 - protein, 10 aa, Artificial Sequence
  Artificial Peptide
EFQAAISRKM

SEQ ID NO: 542 - protein, 8 aa, Artificial Sequence
  Artificial Peptide
ELSMLEVF

SEQ ID NO: 543 - protein, 8 aa, Artificial Sequence
  Artificial Peptide
ELVHFLLL

SEQ ID NO: 544 - protein, 10 aa, Artificial Sequence
  Artificial Peptide
ELVHFLLLKY

SEQ ID NO: 545 - protein, 8 aa, Artificial Sequence
  Artificial Peptide
ETSYVKVL

SEQ ID NO: 546 - protein, 11 aa, Artificial Sequence
  Artificial Peptide
EVFEGREDSVF

SEQ ID NO: 547 - protein, 8 aa, Artificial Sequence
  Artificial Peptide
EVVEVVPI

SEQ ID NO: 548 - protein, 11 aa, Artificial Sequence
  Artificial Peptide
EVVEVVPISHL

SEQ ID NO: 549 - protein, 8 aa, Artificial Sequence
  Artificial Peptide
EVVPISHL

SEQ ID NO: 550 - protein, 9 aa, Artificial Sequence
  Artificial Peptide
EVVPISHLY

SEQ ID NO: 551 - protein, 10 aa, Artificial Sequence
  Artificial Peptide
EVVPISHLYI

SEQ ID NO: 552 - protein, 11 aa, Artificial Sequence
  Artificial Peptide
EVVPISHLYIL

SEQ ID NO: 553 - protein, 9 aa, Artificial Sequence
  Artificial Peptide
EYLQLVFGI

SEQ ID NO: 554 - protein, 8 aa, Artificial Sequence
  Artificial Peptide
FLWGPRAL

SEQ ID NO: 555 - protein, 9 aa, Artificial Sequence
  Artificial Peptide
FLWGPRALI

SEQ ID NO: 556 - protein, 10 aa, Artificial Sequence
  Artificial Peptide
GIEVVEVVPI

SEQ ID NO: 557 - protein, 9 aa, Artificial Sequence
  Artificial Peptide
GLEARGEAL

SEQ ID NO: 558 - protein, 11 aa, Artificial Sequence
  Artificial Peptide
GLEARGEALGL

SEQ ID NO: 559 - protein, 9 aa, Artificial Sequence
  Artificial Peptide
GLLGDNQVM

SEQ ID NO: 560 - protein, 9 aa, Artificial Sequence
  Artificial Peptide
GLLIIVLAI

SEQ ID NO: 561 - protein, 10 aa, Artificial Sequence
  Artificial Peptide
GLLIIVLAII

SEQ ID NO: 562 - protein, 8 aa, Artificial Sequence
  Artificial Peptide
GLSYDGLL

SEQ ID NO: 563 - protein, 9 aa, Artificial Sequence
  Artificial Peptide
HLYILVTCL

SEQ ID NO: 564 - protein, 11 aa, Artificial Sequence
  Artificial Peptide
HLYILVTCLGL

SEQ ID NO: 565 - protein, 11 aa, Artificial Sequence
  Artificial Peptide
HTLKIGGEPHI

SEQ ID NO: 566 - protein, 8 aa, Artificial Sequence
  Artificial Peptide
IFSKASEY

SEQ ID NO: 567 - protein, 9 aa, Artificial Sequence
  Artificial Peptide
IFSKASEYL

SEQ ID NO: 568 - protein, 11 aa, Artificial Sequence
  Artificial Peptide
IFSKASEYLQL

SEQ ID NO: 569 - protein, 9 aa, Artificial Sequence
  Artificial Peptide
IIVLAIIAI

SEQ ID NO: 570 - protein, 8 aa, Artificial Sequence
  Artificial Peptide
ILVTCLGL

SEQ ID NO: 571 - protein, 10 aa, Artificial Sequence
  Artificial Peptide
ILVTCLGLSY

SEQ ID NO: 572 - protein, 8 aa, Artificial Sequence
  Artificial Peptide
IVLAIIAI

SEQ ID NO: 573 - protein, 8 aa, Artificial Sequence
  Artificial Peptide
IWEELSML

SEQ ID NO: 574 - protein, 11 aa, Artificial Sequence
  Artificial Peptide
IWEELSMLEVF

SEQ ID NO: 575 - protein, 8 aa, Artificial Sequence
  Artificial Peptide
KIGGEPHI

SEQ ID NO: 576 - protein, 10 aa, Artificial Sequence
  Artificial Peptide
KIGGEPHISY

SEQ ID NO: 577 - protein, 8 aa, Artificial Sequence
  Artificial Peptide
KIWEELSM

SEQ ID NO: 578 - protein, 9 aa, Artificial Sequence
  Artificial Peptide
KIWEELSML

SEQ ID NO: 579 - protein, 8 aa, Artificial Sequence
  Artificial Peptide
KMVELVHF

SEQ ID NO: 580 - protein, 9 aa, Artificial Sequence
  Artificial Peptide
KMVELVHFL

SEQ ID NO: 581 - protein, 10 aa, Artificial Sequence
  Artificial Peptide
KMVELVHFLL

SEQ ID NO: 582 - protein, 11 aa, Artificial Sequence
  Artificial Peptide
KMVELVHFLLL

SEQ ID NO: 583 - protein, 9 aa, Artificial Sequence
  Artificial Peptide
KTGLLIIVL

SEQ ID NO: 584 - protein, 11 aa, Artificial Sequence
  Artificial Peptide
KTGLLIIVLAI

SEQ ID NO: 585 - protein, 9 aa, Artificial Sequence
  Artificial Peptide
KVLHHTLKI

SEQ ID NO: 586 - protein, 10 aa, Artificial Sequence
  Artificial Peptide
LIETSYVKVL

SEQ ID NO: 587 - protein, 8 aa, Artificial Sequence
  Artificial Peptide
LIIVLAII

SEQ ID NO: 588 - protein, 10 aa, Artificial Sequence
  Artificial Peptide
LIIVLAIIAI

SEQ ID NO: 589 - protein, 8 aa, Artificial Sequence
  Artificial Peptide
LLGDNQVM

SEQ ID NO: 590 - protein, 8 aa, Artificial Sequence
  Artificial Peptide
LLIIVLAI

SEQ ID NO: 591 - protein, 9 aa, Artificial Sequence
  Artificial Peptide
LLIIVLAII

SEQ ID NO: 592 - protein, 11 aa, Artificial Sequence
  Artificial Peptide
LLIIVLAIIAI

SEQ ID NO: 593 - protein, 11 aa, Artificial Sequence
  Artificial Peptide
LLMQDLVQENY

SEQ ID NO: 594 - protein, 10 aa, Artificial Sequence
  Artificial Peptide
LMQDLVQENY

SEQ ID NO: 595 - protein, 11 aa, Artificial Sequence
  Artificial Peptide
LMQDLVQENYL

SEQ ID NO: 596 - protein, 9 aa, Artificial Sequence
  Artificial Peptide
LVHFLLLKY

SEQ ID NO: 597 - protein, 9 aa, Artificial Sequence
  Artificial Peptide
LVQENYLEY

SEQ ID NO: 598 - protein, 9 aa, Artificial Sequence
  Artificial Peptide
LVTCLGLSY

SEQ ID NO: 599 - protein, 8 aa, Artificial Sequence
  Artificial Peptide
LWGPRALI

SEQ ID NO: 600 - protein, 8 aa, Artificial Sequence
  Artificial Peptide
LYILVTCL

SEQ ID NO: 601 - protein, 10 aa, Artificial Sequence
  Artificial Peptide
LYILVTCLGL

SEQ ID NO: 602 - protein, 9 aa, Artificial Sequence
  Artificial Peptide
MFPDLESEF

SEQ ID NO: 603 - protein, 8 aa, Artificial Sequence
  Artificial Peptide
MVELVHFL

SEQ ID NO: 604 - protein, 9 aa, Artificial Sequence
  Artificial Peptide
MVELVHFLL

SEQ ID NO: 605 - protein, 10 aa, Artificial Sequence
  Artificial Peptide
MVELVHFLLL

SEQ ID NO: 606 - protein, 8 aa, Artificial Sequence
  Artificial Peptide
PISHLYIL

SEQ ID NO: 607 - protein, 10 aa, Artificial Sequence
  Artificial Peptide
PVIFSKASEY

SEQ ID NO: 608 - protein, 11 aa, Artificial Sequence
  Artificial Peptide
PVIFSKASEYL

SEQ ID NO: 609 - protein, 8 aa, Artificial Sequence
  Artificial Peptide
PVTKAEML

SEQ ID NO: 610 - protein, 9 aa, Artificial Sequence
  Artificial Peptide
QTASSSSTL

SEQ ID NO: 611 - protein, 8 aa, Artificial Sequence
  Artificial Peptide
QVMPKTGL

SEQ ID NO: 612 - protein, 9 aa, Artificial Sequence
  Artificial Peptide
QVMPKTGLL

SEQ ID NO: 613 - protein, 10 aa, Artificial Sequence
  Artificial Peptide
QVMPKTGLLI

SEQ ID NO: 614 - protein, 11 aa, Artificial Sequence
  Artificial Peptide
QVMPKTGLLII

SEQ ID NO: 615 - protein, 10 aa, Artificial Sequence
  Artificial Peptide
QVPGSDPACY

SEQ ID NO: 616 - protein, 10 aa, Artificial Sequence
  Artificial Peptide
RMFPDLESEF

SEQ ID NO: 617 - protein, 8 aa, Artificial Sequence
  Artificial Peptide
SFSTTINY

SEQ ID NO: 618 - protein, 10 aa, Artificial Sequence
  Artificial Peptide
SFSTTINYTL

SEQ ID NO: 619 - protein, 11 aa, Artificial Sequence
  Artificial Peptide
SFSTTINYTLW

SEQ ID NO: 620 - protein, 8 aa, Artificial Sequence
  Artificial Peptide
STLVEVTL

SEQ ID NO: 621 - protein, 8 aa, Artificial Sequence
  Artificial Peptide
STTINYTL

SEQ ID NO: 622 - protein, 9 aa, Artificial Sequence
  Artificial Peptide
STTINYTLW

SEQ ID NO: 623 - protein, 9 aa, Artificial Sequence
  Artificial Peptide
SVFAHPRKL

SEQ ID NO: 624 - protein, 10 aa, Artificial Sequence
  Artificial Peptide
SVFAHPRKLL

SEQ ID NO: 625 - protein, 11 aa, Artificial Sequence
  Artificial Peptide
SVFAHPRKLLM

SEQ ID NO: 626 - protein, 9 aa, Artificial Sequence
  Artificial Peptide
SVLRNCQDF

SEQ ID NO: 627 - protein, 10 aa, Artificial Sequence
  Artificial Peptide
SVLRNCQDFF

SEQ ID NO: 628 - protein, 10 aa, Artificial Sequence
  Artificial Peptide
SYPPLHERAL

SEQ ID NO: 629 - protein, 10 aa, Artificial Sequence
  Artificial Peptide
SYVKVLHHTL

SEQ ID NO: 630 - protein, 10 aa, Artificial Sequence
  Artificial Peptide
TLKIGGEPHI

SEQ ID NO: 631 - protein, 8 aa, Artificial Sequence
  Artificial Peptide
TTINYTLW

SEQ ID NO: 632 - protein, 8 aa, Artificial Sequence
  Artificial Peptide
VFAHPRKL

SEQ ID NO: 633 - protein, 9 aa, Artificial Sequence
  Artificial Peptide
VFAHPRKLL

SEQ ID NO: 634 - protein, 10 aa, Artificial Sequence
  Artificial Peptide
VFAHPRKLLM

SEQ ID NO: 635 - protein, 10 aa, Artificial Sequence
  Artificial Peptide
VFEGREDSVF

SEQ ID NO: 636 - protein, 9 aa, Artificial Sequence
  Artificial Peptide
VIFSKASEY

SEQ ID NO: 637 - protein, 10 aa, Artificial Sequence
  Artificial Peptide
VIFSKASEYL

SEQ ID NO: 638 - protein, 8 aa, Artificial Sequence
  Artificial Peptide
VLHHTLKI

SEQ ID NO: 639 - protein, 8 aa, Artificial Sequence
  Artificial Peptide
VLRNCQDF

SEQ ID NO: 640 - protein, 9 aa, Artificial Sequence
  Artificial Peptide
VLRNCQDFF

SEQ ID NO: 641 - protein, 8 aa, Artificial Sequence
  Artificial Peptide
VMPKTGLL

SEQ ID NO: 642 - protein, 9 aa, Artificial Sequence
  Artificial Peptide
VMPKTGLLI

SEQ ID NO: 643 - protein, 10 aa, Artificial Sequence
  Artificial Peptide
VMPKTGLLII

SEQ ID NO: 644 - protein, 8 aa, Artificial Sequence
  Artificial Peptide
VTCLGLSY

SEQ ID NO: 645 - protein, 11 aa, Artificial Sequence
  Artificial Peptide
VTCLGLSYDGL

SEQ ID NO: 646 - protein, 11 aa, Artificial Sequence
  Artificial Peptide
VTKAEMLESVL

SEQ ID NO: 647 - protein, 10 aa, Artificial Sequence
  Artificial Peptide
VVEVVPISHL

SEQ ID NO: 648 - protein, 11 aa, Artificial Sequence
  Artificial Peptide
VVEVVPISHLY

SEQ ID NO: 649 - protein, 8 aa, Artificial Sequence
  Artificial Peptide
VVPISHLY

SEQ ID NO: 650 - protein, 9 aa, Artificial Sequence
  Artificial Peptide
VVPISHLYI

SEQ ID NO: 651 - protein, 10 aa, Artificial Sequence
  Artificial Peptide
VVPISHLYIL

SEQ ID NO: 652 - protein, 9 aa, Artificial Sequence
  Artificial Peptide
YILVTCLGL

SEQ ID NO: 653 - protein, 11 aa, Artificial Sequence
  Artificial Peptide
YILVTCLGLSY

SEQ ID NO: 654 - protein, 8 aa, Artificial Sequence
  Artificial Peptide
YLQLVFGI

SEQ ID NO: 655 - protein, 9 aa, Artificial Sequence
  Artificial Peptide
YVKVLHHTL

SEQ ID NO: 656 - protein, 11 aa, Artificial Sequence
  Artificial Peptide
YVKVLHHTLKI

SEQ ID NO: 657 - protein, 9 aa, Artificial Sequence
  Artificial Peptide
ALSRKVAEL

SEQ ID NO: 658 - protein, 11 aa, Artificial Sequence
  Artificial Peptide
ALVETSYVKVL

SEQ ID NO: 659 - protein, 8 aa, Artificial Sequence
  Artificial Peptide
ATCLGLSY

SEQ ID NO: 660 - protein, 11 aa, Artificial Sequence
  Artificial Peptide
ATCLGLSYDGL

SEQ ID NO: 661 - protein, 9 aa, Artificial Sequence
  Artificial Peptide
CLGLSYDGL

SEQ ID NO: 662 - protein, 10 aa, Artificial Sequence
  Artificial Peptide
CLGLSYDGLL

SEQ ID NO: 663 - protein, 11 aa, Artificial Sequence
  Artificial Peptide
CYEFLWGPRAL

SEQ ID NO: 664 - protein, 10 aa, Artificial Sequence
  Artificial Peptide
DLESEFQAAL

SEQ ID NO: 665 - protein, 9 aa, Artificial Sequence
  Artificial Peptide
EFLWGPRAL

SEQ ID NO: 666 - protein, 8 aa, Artificial Sequence
  Artificial Peptide
ELMEVDPI

SEQ ID NO: 667 - protein, 11 aa, Artificial Sequence
  Artificial Peptide
ELMEVDPIGHL

SEQ ID NO: 668 - protein, 8 aa, Artificial Sequence
  Artificial Peptide
ELSVLEVF

SEQ ID NO: 669 - protein, 8 aa, Artificial Sequence
  Artificial Peptide
ELVHFLLL

SEQ ID NO: 670 - protein, 10 aa, Artificial Sequence
  Artificial Peptide
ELVHFLLLKY

SEQ ID NO: 671 - protein, 10 aa, Artificial Sequence
  Artificial Peptide
EMLGSVVGNW

SEQ ID NO: 672 - protein, 8 aa, Artificial Sequence
  Artificial Peptide
ETSYVKVL

SEQ ID NO: 673 - protein, 11 aa, Artificial Sequence
  Artificial Peptide
ETSYVKVLHHM

SEQ ID NO: 674 - protein, 8 aa, Artificial Sequence
  Artificial Peptide
EVDPIGHL

SEQ ID NO: 675 - protein, 9 aa, Artificial Sequence
  Artificial Peptide
EVDPIGHLY

SEQ ID NO: 676 - protein, 10 aa, Artificial Sequence
  Artificial Peptide
EVDPIGHLYI

SEQ ID NO: 677 - protein, 11 aa, Artificial Sequence
  Artificial Peptide
EVDPIGHLYIF

SEQ ID NO: 678 - protein, 10 aa, Artificial Sequence
  Artificial Peptide
EVFEGREDSI

SEQ ID NO: 679 - protein, 11 aa, Artificial Sequence
  Artificial Peptide
EVFEGREDSIL

SEQ ID NO: 680 - protein, 8 aa, Artificial Sequence
  Artificial Peptide
FLWGPRAL

SEQ ID NO: 681 - protein, 9 aa, Artificial Sequence
  Artificial Peptide
FVQENYLEY

SEQ ID NO: 682 - protein, 10 aa, Artificial Sequence
  Artificial Peptide
GIELMEVDPI

SEQ ID NO: 683 - protein, 9 aa, Artificial Sequence
  Artificial Peptide
GLEARGEAL

SEQ ID NO: 684 - protein, 11 aa, Artificial Sequence
  Artificial Peptide
GLEARGEALGL

SEQ ID NO: 685 - protein, 8 aa, Artificial Sequence
  Artificial Peptide
GLLGDNQI

SEQ ID NO: 686 - protein, 9 aa, Artificial Sequence
  Artificial Peptide
GLLGDNQIM

SEQ ID NO: 687 - protein, 9 aa, Artificial Sequence
  Artificial Peptide
GLLIIVLAI

SEQ ID NO: 688 - protein, 10 aa, Artificial Sequence
  Artificial Peptide
GLLIIVLAII

SEQ ID NO: 689 - protein, 8 aa, Artificial Sequence
  Artificial Peptide
GLSYDGLL

SEQ ID NO: 690 - protein, 8 aa, Artificial Sequence
  Artificial Peptide
HFVQENYL

SEQ ID NO: 691 - protein, 10 aa, Artificial Sequence
  Artificial Peptide
HFVQENYLEY

SEQ ID NO: 692 - protein, 10 aa, Artificial Sequence
  Artificial Peptide
HISYPPLHEW

SEQ ID NO: 693 - protein, 9 aa, Artificial Sequence
  Artificial Peptide
HLYIFATCL

SEQ ID NO: 694 - protein, 11 aa, Artificial Sequence
  Artificial Peptide
HLYIFATCLGL

SEQ ID NO: 695 - protein, 11 aa, Artificial Sequence
  Artificial Peptide
HMVKISGGPHI

SEQ ID NO: 696 - protein, 8 aa, Artificial Sequence
  Artificial Peptide
IFATCLGL

SEQ ID NO: 697 - protein, 10 aa, Artificial Sequence
  Artificial Peptide
IFATCLGLSY

SEQ ID NO: 698 - protein, 9 aa, Artificial Sequence
  Artificial Peptide
IFSKASSSL

SEQ ID NO: 699 - protein, 11 aa, Artificial Sequence
  Artificial Peptide
IFSKASSSLQL

SEQ ID NO: 700 - protein, 8 aa, Artificial Sequence
  Artificial Peptide
ILGDPKKL

SEQ ID NO: 701 - protein, 9 aa, Artificial Sequence
  Artificial Peptide
ILGDPKKLL

SEQ ID NO: 702 - protein, 8 aa, Artificial Sequence
  Artificial Peptide
IMPKAGLL

SEQ ID NO: 703 - protein, 9 aa, Artificial Sequence
  Artificial Peptide
IMPKAGLLI

SEQ ID NO: 704 - protein, 10 aa, Artificial Sequence
  Artificial Peptide
IMPKAGLLII

SEQ ID NO: 705 - protein, 8 aa, Artificial Sequence
  Artificial Peptide
IWEELSVL

SEQ ID NO: 706 - protein, 11 aa, Artificial Sequence
  Artificial Peptide
IWEELSVLEVF

SEQ ID NO: 707 - protein, 8 aa, Artificial Sequence
  Artificial Peptide
KISGGPHI

SEQ ID NO: 708 - protein, 10 aa, Artificial Sequence
  Artificial Peptide
KISGGPHISY

SEQ ID NO: 709 - protein, 9 aa, Artificial Sequence
  Artificial Peptide
KIWEELSVL

SEQ ID NO: 710 - protein, 8 aa, Artificial Sequence
  Artificial Peptide
KVAELVHF

SEQ ID NO: 711 - protein, 9 aa, Artificial Sequence
  Artificial Peptide
KVAELVHFL

SEQ ID NO: 712 - protein, 10 aa, Artificial Sequence
  Artificial Peptide
KVAELVHFLL

SEQ ID NO: 713 - protein, 11 aa, Artificial Sequence
  Artificial Peptide
KVAELVHFLLL

SEQ ID NO: 714 - protein, 9 aa, Artificial Sequence
  Artificial Peptide
KVLHHMVKI

SEQ ID NO: 715 - protein, 8 aa, Artificial Sequence
  Artificial Peptide
LIIVLAII

SEQ ID NO: 716 - protein, 8 aa, Artificial Sequence
  Artificial Peptide
LLGDNQIM

SEQ ID NO: 717 - protein, 8 aa, Artificial Sequence
  Artificial Peptide
LLIIVLAI

SEQ ID NO: 718 - protein, 9 aa, Artificial Sequence
  Artificial Peptide
LLIIVLAII

SEQ ID NO: 719 - protein, 11 aa, Artificial Sequence
  Artificial Peptide
LLTQHFVQENY

SEQ ID NO: 720 - protein, 10 aa, Artificial Sequence
  Artificial Peptide
LMEVDPIGHL

SEQ ID NO: 721 - protein, 11 aa, Artificial Sequence
  Artificial Peptide
LMEVDPIGHLY

SEQ ID NO: 722 - protein, 10 aa, Artificial Sequence
  Artificial Peptide
LTQHFVQENY

SEQ ID NO: 723 - protein, 11 aa, Artificial Sequence
  Artificial Peptide
LTQHFVQENYL

SEQ ID NO: 724 - protein, 10 aa, Artificial Sequence
  Artificial Peptide
LVETSYVKVL

SEQ ID NO: 725 - protein, 8 aa, Artificial Sequence
  Artificial Peptide
LVFGIELM

SEQ ID NO: 726 - protein, 9 aa, Artificial Sequence
  Artificial Peptide
LVHFLLLKY

SEQ ID NO: 727 - protein, 8 aa, Artificial Sequence
  Artificial Peptide
LYIFATCL

SEQ ID NO: 728 - protein, 10 aa, Artificial Sequence
  Artificial Peptide
LYIFATCLGL

SEQ ID NO: 729 - protein, 9 aa, Artificial Sequence
  Artificial Peptide
MLGSVVGNW

SEQ ID NO: 730 - protein, 11 aa, Artificial Sequence
  Artificial Peptide
MLGSVVGNWQY

SEQ ID NO: 731 - protein, 10 aa, Artificial Sequence
  Artificial Peptide
MVKISGGPHI

SEQ ID NO: 732 - protein, 9 aa, Artificial Sequence
  Artificial Peptide
NWQYFFPVI

SEQ ID NO: 733 - protein, 10 aa, Artificial Sequence
  Artificial Peptide
NWQYFFPVIF

SEQ ID NO: 734 - protein, 9 aa, Artificial Sequence
  Artificial Peptide
NYPLWSQSY

SEQ ID NO: 735 - protein, 8 aa, Artificial Sequence
  Artificial Peptide
PIGHLYIF

SEQ ID NO: 736 - protein, 8 aa, Artificial Sequence
  Artificial Peptide
PTTMNYPL

SEQ ID NO: 737 - protein, 9 aa, Artificial Sequence
  Artificial Peptide
PTTMNYPLW

SEQ ID NO: 738 - protein, 11 aa, Artificial Sequence
  Artificial Peptide
PVIFSKASSSL

SEQ ID NO: 739 - protein, 8 aa, Artificial Sequence
  Artificial Peptide
PVTKAEML

SEQ ID NO: 740 - protein, 8 aa, Artificial Sequence
  Artificial Peptide
QIMPKAGL

SEQ ID NO: 741 - protein, 9 aa, Artificial Sequence
  Artificial Peptide
QIMPKAGLL

SEQ ID NO: 742 - protein, 10 aa, Artificial Sequence
  Artificial Peptide
QIMPKAGLLI

SEQ ID NO: 743 - protein, 11 aa, Artificial Sequence
  Artificial Peptide
QIMPKAGLLII

SEQ ID NO: 744 - protein, 8 aa, Artificial Sequence
  Artificial Peptide
QLVFGIEL

SEQ ID NO: 745 - protein, 9 aa, Artificial Sequence
  Artificial Peptide
QLVFGIELM

SEQ ID NO: 746 - protein, 10 aa, Artificial Sequence
  Artificial Peptide
QVPGSDPACY

SEQ ID NO: 747 - protein, 8 aa, Artificial Sequence
  Artificial Peptide
QYFFPVIF

SEQ ID NO: 748 - protein, 9 aa, Artificial Sequence
  Artificial Peptide
SILGDPKKL

SEQ ID NO: 749 - protein, 10 aa, Artificial Sequence
  Artificial Peptide
SILGDPKKLL

SEQ ID NO: 750 - protein, 8 aa, Artificial Sequence
  Artificial Peptide
SLPTTMNY

SEQ ID NO: 751 - protein, 10 aa, Artificial Sequence
  Artificial Peptide
SLPTTMNYPL

SEQ ID NO: 752 - protein, 11 aa, Artificial Sequence
  Artificial Peptide
SLPTTMNYPLW

SEQ ID NO: 753 - protein, 8 aa, Artificial Sequence
  Artificial Peptide
SLQLVFGI

SEQ ID NO: 754 - protein, 10 aa, Artificial Sequence
  Artificial Peptide
SLQLVFGIEL

SEQ ID NO: 755 - protein, 11 aa, Artificial Sequence
  Artificial Peptide
SLQLVFGIELM

SEQ ID NO: 756 - protein, 10 aa, Artificial Sequence
  Artificial Peptide
STFPDLESEF

SEQ ID NO: 757 - protein, 8 aa, Artificial Sequence
  Artificial Peptide
STLVEVTL

SEQ ID NO: 758 - protein, 8 aa, Artificial Sequence
  Artificial Peptide
SVVGNWQY

SEQ ID NO: 759 - protein, 9 aa, Artificial Sequence
  Artificial Peptide
SVVGNWQYF

SEQ ID NO: 760 - protein, 10 aa, Artificial Sequence
  Artificial Peptide
SVVGNWQYFF

SEQ ID NO: 761 - protein, 11 aa, Artificial Sequence
  Artificial Peptide
SYDGLLGDNQI

SEQ ID NO: 762 - protein, 8 aa, Artificial Sequence
  Artificial Peptide
SYPPLHEW

SEQ ID NO: 763 - protein, 10 aa, Artificial Sequence
  Artificial Peptide
SYPPLHEWVL

SEQ ID NO: 764 - protein, 9 aa, Artificial Sequence
  Artificial Peptide
SYVKVLHHM

SEQ ID NO: 765 - protein, 9 aa, Artificial Sequence
  Artificial Peptide
TFPDLESEF

SEQ ID NO: 766 - protein, 11 aa, Artificial Sequence
  Artificial Peptide
TMNYPLWSQSY

SEQ ID NO: 767 - protein, 8 aa, Artificial Sequence
  Artificial Peptide
TTMNYPLW

SEQ ID NO: 768 - protein, 9 aa, Artificial Sequence
  Artificial Peptide
VFEGREDSI

SEQ ID NO: 769 - protein, 10 aa, Artificial Sequence
  Artificial Peptide
VFEGREDSIL

SEQ ID NO: 770 - protein, 10 aa, Artificial Sequence
  Artificial Peptide
VIFSKASSSL

SEQ ID NO: 771 - protein, 8 aa, Artificial Sequence
  Artificial Peptide
VLHHMVKI

SEQ ID NO: 772 - protein, 8 aa, Artificial Sequence
  Artificial Peptide
VVGNWQYF

SEQ ID NO: 773 - protein, 9 aa, Artificial Sequence
  Artificial Peptide
VVGNWQYFF

SEQ ID NO: 774 - protein, 9 aa, Artificial Sequence
  Artificial Peptide
YIFATCLGL

SEQ ID NO: 775 - protein, 11 aa, Artificial Sequence
  Artificial Peptide
YIFATCLGLSY

SEQ ID NO: 776 - protein, 8 aa, Artificial Sequence
  Artificial Peptide
YVKVLHHM

SEQ ID NO: 777 - protein, 11 aa, Artificial Sequence
  Artificial Peptide
YVKVLHHMVKI

SEQ ID NO: 778 - protein, 10 aa, Artificial Sequence
  Artificial Peptide
APATEEQQTA

SEQ ID NO: 779 - protein, 10 aa, Artificial Sequence
  Artificial Peptide
APEEKIWEEL

SEQ ID NO: 780 - protein, 8 aa, Artificial Sequence
  Artificial Peptide
DPACYEFL

SEQ ID NO: 781 - protein, 9 aa, Artificial Sequence
  Artificial Peptide
DPACYEFLW

SEQ ID NO: 782 - protein, 9 aa, Artificial Sequence
  Artificial Peptide
EPHISYPPL

SEQ ID NO: 783 - protein, 8 aa, Artificial Sequence
  Artificial Peptide
EPVTKAEM

SEQ ID NO: 784 - protein, 9 aa, Artificial Sequence
  Artificial Peptide
EPVTKAEML

SEQ ID NO: 785 - protein, 8 aa, Artificial Sequence
  Artificial Peptide
FPDLESEF

SEQ ID NO: 786 - protein, 10 aa, Artificial Sequence
  Artificial Peptide
FPDLESEFQA

SEQ ID NO: 787 - protein, 11 aa, Artificial Sequence
  Artificial Peptide
FPDLESEFQAA

SEQ ID NO: 788 - protein, 8 aa, Artificial Sequence
  Artificial Peptide
FPVIFSKA

SEQ ID NO: 789 - protein, 11 aa, Artificial Sequence
  Artificial Peptide
FPVIFSKASEY

SEQ ID NO: 790 - protein, 10 aa, Artificial Sequence
  Artificial Peptide
GPRALIETSY

SEQ ID NO: 791 - protein, 11 aa, Artificial Sequence
  Artificial Peptide
GPRALIETSYV

SEQ ID NO: 792 - protein, 8 aa, Artificial Sequence
  Artificial Peptide
GPRMFPDL

SEQ ID NO: 793 - protein, 10 aa, Artificial Sequence
  Artificial Peptide
HPRKLLMQDL

SEQ ID NO: 794 - protein, 11 aa, Artificial Sequence
  Artificial Peptide
HPRKLLMQDLV

SEQ ID NO: 795 - protein, 8 aa, Artificial Sequence
  Artificial Peptide
KPEEGLEA

SEQ ID NO: 796 - protein, 8 aa, Artificial Sequence
  Artificial Peptide
MPKTGLLI

SEQ ID NO: 797 - protein, 9 aa, Artificial Sequence
  Artificial Peptide
MPKTGLLII

SEQ ID NO: 798 - protein, 10 aa, Artificial Sequence
  Artificial Peptide
MPKTGLLIIV

SEQ ID NO: 799 - protein, 11 aa, Artificial Sequence
  Artificial Peptide
MPKTGLLIIVL

SEQ ID NO: 800 - protein, 8 aa, Artificial Sequence
  Artificial Peptide
PPHSPQGA

SEQ ID NO: 801 - protein, 11 aa, Artificial Sequence
  Artificial Peptide
PPHSPQGASSF

SEQ ID NO: 802 - protein, 8 aa, Artificial Sequence
  Artificial Peptide
PPLHERAL

SEQ ID NO: 803 - protein, 9 aa, Artificial Sequence
  Artificial Peptide
SPPHSPQGA

SEQ ID NO: 804 - protein, 8 aa, Artificial Sequence
  Artificial Peptide
SPQGASSF

SEQ ID NO: 805 - protein, 11 aa, Artificial Sequence
  Artificial Peptide
SPSPPHSPQGA

SEQ ID NO: 806 - protein, 9 aa, Artificial Sequence
  Artificial Peptide
VPGSDPACY

SEQ ID NO: 807 - protein, 11 aa, Artificial Sequence
  Artificial Peptide
VPGSDPACYEF

SEQ ID NO: 808 - protein, 8 aa, Artificial Sequence
  Artificial Peptide
VPISHLYI

SEQ ID NO: 809 - protein, 9 aa, Artificial Sequence
  Artificial Peptide
VPISHLYIL

SEQ ID NO: 810 - protein, 10 aa, Artificial Sequence
  Artificial Peptide
VPISHLYILV

SEQ ID NO: 811 - protein, 8 aa, Artificial Sequence
  Artificial Peptide
YPPLHERA

SEQ ID NO: 812 - protein, 9 aa, Artificial Sequence
  Artificial Peptide
YPPLHERAL

SEQ ID NO: 813 - protein, 9 aa, Artificial Sequence
  Artificial Peptide
APATEEQEA

SEQ ID NO: 814 - protein, 10 aa, Artificial Sequence
  Artificial Peptide
APATEEQEAA

SEQ ID NO: 815 - protein, 10 aa, Artificial Sequence
  Artificial Peptide
APEEKIWEEL

SEQ ID NO: 816 - protein, 8 aa, Artificial Sequence
  Artificial Peptide
DPACYEFL

SEQ ID NO: 817 - protein, 9 aa, Artificial Sequence
  Artificial Peptide
DPACYEFLW

SEQ ID NO: 818 - protein, 8 aa, Artificial Sequence
  Artificial Peptide
DPIGHLYI

SEQ ID NO: 819 - protein, 9 aa, Artificial Sequence
  Artificial Peptide
DPIGHLYIF

SEQ ID NO: 820 - protein, 10 aa, Artificial Sequence
  Artificial Peptide
DPIGHLYIFA

SEQ ID NO: 821 - protein, 10 aa, Artificial Sequence
  Artificial Peptide
DPKKLLTQHF

SEQ ID NO: 822 - protein, 11 aa, Artificial Sequence
  Artificial Peptide
DPKKLLTQHFV

SEQ ID NO: 823 - protein, 9 aa, Artificial Sequence
  Artificial Peptide
DPPQSPQGA

SEQ ID NO: 824 - protein, 8 aa, Artificial Sequence
  Artificial Peptide
EPVTKAEM

SEQ ID NO: 825 - protein, 9 aa, Artificial Sequence
  Artificial Peptide
EPVTKAEML

SEQ ID NO: 826 - protein, 8 aa, Artificial Sequence
  Artificial Peptide
FPDLESEF

SEQ ID NO: 827 - protein, 10 aa, Artificial Sequence
  Artificial Peptide
FPDLESEFQA

SEQ ID NO: 828 - protein, 11 aa, Artificial Sequence
  Artificial Peptide
FPDLESEFQAA

SEQ ID NO: 829 - protein, 8 aa, Artificial Sequence
  Artificial Peptide
FPVIFSKA

SEQ ID NO: 830 - protein, 9 aa, Artificial Sequence
  Artificial Peptide
GPHISYPPL

SEQ ID NO: 831 - protein, 10 aa, Artificial Sequence
  Artificial Peptide
GPRALVETSY

SEQ ID NO: 832 - protein, 11 aa, Artificial Sequence
  Artificial Peptide
GPRALVETSYV

SEQ ID NO: 833 - protein, 8 aa, Artificial Sequence
  Artificial Peptide
GPSTFPDL

SEQ ID NO: 834 - protein, 8 aa, Artificial Sequence
  Artificial Peptide
KPEEGLEA

SEQ ID NO: 835 - protein, 9 aa, Artificial Sequence
  Artificial Peptide
LPTTMNYPL

SEQ ID NO: 836 - protein, 10 aa, Artificial Sequence
  Artificial Peptide
LPTTMNYPLW

SEQ ID NO: 837 - protein, 8 aa, Artificial Sequence
  Artificial Peptide
MPKAGLLI

SEQ ID NO: 838 - protein, 9 aa, Artificial Sequence
  Artificial Peptide
MPKAGLLII

SEQ ID NO: 839 - protein, 10 aa, Artificial Sequence
  Artificial Peptide
MPKAGLLIIV

SEQ ID NO: 840 - protein, 11 aa, Artificial Sequence
  Artificial Peptide
MPKAGLLIIVL

SEQ ID NO: 841 - protein, 8 aa, Artificial Sequence
  Artificial Peptide
PPLHEWVL

SEQ ID NO: 842 - protein, 8 aa, Artificial Sequence
  Artificial Peptide
PPQSPQGA

SEQ ID NO: 843 - protein, 11 aa, Artificial Sequence
  Artificial Peptide
PPQSPQGASSL

SEQ ID NO: 844 - protein, 11 aa, Artificial Sequence
  Artificial Peptide
SPDPPQSPQGA

SEQ ID NO: 845 - protein, 8 aa, Artificial Sequence
  Artificial Peptide
SPQGASSL

SEQ ID NO: 846 - protein, 9 aa, Artificial Sequence
  Artificial Peptide
VPGSDPACY

SEQ ID NO: 847 - protein, 11 aa, Artificial Sequence
  Artificial Peptide
VPGSDPACYEF

SEQ ID NO: 848 - protein, 8 aa, Artificial Sequence
  Artificial Peptide
YPLWSQSY

SEQ ID NO: 849 - protein, 8 aa, Artificial Sequence
  Artificial Peptide
YPPLHEWV

SEQ ID NO: 850 - protein, 9 aa, Artificial Sequence
  Artificial Peptide
YPPLHEWVL

SEQ ID NO: 851 - protein, 8 aa, Artificial Sequence
  Artificial Peptide
AHPRKLLM

SEQ ID NO: 852 - protein, 11 aa, Artificial Sequence
  Artificial Peptide
AHPRKLLMQDL

SEQ ID NO: 853 - protein, 10 aa, Artificial Sequence
  Artificial Peptide
AREPVTKAEM

SEQ ID NO: 854 - protein, 11 aa, Artificial Sequence
  Artificial Peptide
AREPVTKAEML

SEQ ID NO: 855 - protein, 8 aa, Artificial Sequence
  Artificial Peptide
ARGEALGL

SEQ ID NO: 856 - protein, 9 aa, Artificial Sequence
  Artificial Peptide
EKIWEELSM

SEQ ID NO: 857 - protein, 10 aa, Artificial Sequence
  Artificial Peptide
EKIWEELSML

SEQ ID NO: 858 - protein, 9 aa, Artificial Sequence
  Artificial Peptide
LKIGGEPHI

SEQ ID NO: 859 - protein, 11 aa, Artificial Sequence
  Artificial Peptide
LKIGGEPHISY

SEQ ID NO: 860 - protein, 8 aa, Artificial Sequence
  Artificial Peptide
LRNCQDFF

SEQ ID NO: 861 - protein, 11 aa, Artificial Sequence
  Artificial Peptide
LRNCQDFFPVI

SEQ ID NO: 862 - protein, 8 aa, Artificial Sequence
  Artificial Peptide
PHISYPPL

SEQ ID NO: 863 - protein, 10 aa, Artificial Sequence
  Artificial Peptide
PHSPQGASSF

SEQ ID NO: 864 - protein, 8 aa, Artificial Sequence
  Artificial Peptide
PKTGLLII

SEQ ID NO: 865 - protein, 10 aa, Artificial Sequence
  Artificial Peptide
PKTGLLIIVL

SEQ ID NO: 866 - protein, 9 aa, Artificial Sequence
  Artificial Peptide
PRALIETSY

SEQ ID NO: 867 - protein, 9 aa, Artificial Sequence
  Artificial Peptide
PRKLLMQDL

SEQ ID NO: 868 - protein, 11 aa, Artificial Sequence
  Artificial Peptide
PRMFPDLESEF

SEQ ID NO: 869 - protein, 9 aa, Artificial Sequence
  Artificial Peptide
QHCKPEEGL

SEQ ID NO: 870 - protein, 8 aa, Artificial Sequence
  Artificial Peptide
RKLLMQDL

SEQ ID NO: 871 - protein, 9 aa, Artificial Sequence
  Artificial Peptide
RKMVELVHF

SEQ ID NO: 872 - protein, 10 aa, Artificial Sequence
  Artificial Peptide
RKMVELVHFL

SEQ ID NO: 873 - protein, 11 aa, Artificial Sequence
  Artificial Peptide
RKMVELVHFLL

SEQ ID NO: 874 - protein, 10 aa, Artificial Sequence
  Artificial Peptide
SHLYILVTCL

SEQ ID NO: 875 - protein, 9 aa, Artificial Sequence
  Artificial Peptide
SKASEYLQL

SEQ ID NO: 876 - protein, 11 aa, Artificial Sequence
  Artificial Peptide
SKASEYLQLVF

SEQ ID NO: 877 - protein, 10 aa, Artificial Sequence
  Artificial Peptide
SRKMVELVHF

SEQ ID NO: 878 - protein, 11 aa, Artificial Sequence
  Artificial Peptide
SRKMVELVHFL

SEQ ID NO: 879 - protein, 10 aa, Artificial Sequence
  Artificial Peptide
TKAEMLESVL

SEQ ID NO: 880 - protein, 8 aa, Artificial Sequence
  Artificial Peptide
VHFLLLKY

SEQ ID NO: 881 - protein, 8 aa, Artificial Sequence
  Artificial Peptide
VKVLHHTL

SEQ ID NO: 882 - protein, 10 aa, Artificial Sequence
  Artificial Peptide
VKVLHHTLKI

SEQ ID NO: 883 - protein, 10 aa, Artificial Sequence
  Artificial Peptide
AREPVTKAEM

SEQ ID NO: 884 - protein, 11 aa, Artificial Sequence
  Artificial Peptide
AREPVTKAEML

SEQ ID NO: 885 - protein, 8 aa, Artificial Sequence
  Artificial Peptide
ARGEALGL

SEQ ID NO: 886 - protein, 10 aa, Artificial Sequence
  Artificial Peptide
EKIWEELSVL

SEQ ID NO: 887 - protein, 10 aa, Artificial Sequence
  Artificial Peptide
GHLYIFATCL

SEQ ID NO: 888 - protein, 8 aa, Artificial Sequence
  Artificial Peptide
KKLLTQHF

SEQ ID NO: 889 - protein, 8 aa, Artificial Sequence
  Artificial Peptide
PHISYPPL

SEQ ID NO: 890 - protein, 11 aa, Artificial Sequence
  Artificial Peptide
PHISYPPLHEW

SEQ ID NO: 891 - protein, 8 aa, Artificial Sequence
  Artificial Peptide
PKAGLLII

SEQ ID NO: 892 - protein, 10 aa, Artificial Sequence
  Artificial Peptide
PKAGLLIIVL

SEQ ID NO: 893 - protein, 9 aa, Artificial Sequence
  Artificial Peptide
PKKLLTQHF

SEQ ID NO: 894 - protein, 9 aa, Artificial Sequence
  Artificial Peptide
PRALVETSY

SEQ ID NO: 895 - protein, 9 aa, Artificial Sequence
  Artificial Peptide
QHCKPEEGL

SEQ ID NO: 896 - protein, 8 aa, Artificial Sequence
  Artificial Peptide
QHFVQENY

SEQ ID NO: 897 - protein, 9 aa, Artificial Sequence
  Artificial Peptide
QHFVQENYL

SEQ ID NO: 898 - protein, 11 aa, Artificial Sequence
  Artificial Peptide
QHFVQENYLEY

SEQ ID NO: 899 - protein, 9 aa, Artificial Sequence
  Artificial Peptide
RKVAELVHF

SEQ ID NO: 900 - protein, 10 aa, Artificial Sequence
  Artificial Peptide
RKVAELVHFL

SEQ ID NO: 901 - protein, 11 aa, Artificial Sequence
  Artificial Peptide
RKVAELVHFLL

SEQ ID NO: 902 - protein, 9 aa, Artificial Sequence
  Artificial Peptide
SKASSSLQL

SEQ ID NO: 903 - protein, 11 aa, Artificial Sequence
  Artificial Peptide
SKASSSLQLVF

SEQ ID NO: 904 - protein, 10 aa, Artificial Sequence
  Artificial Peptide
SRKVAELVHF

SEQ ID NO: 905 - protein, 11 aa, Artificial Sequence
  Artificial Peptide
SRKVAELVHFL

SEQ ID NO: 906 - protein, 8 aa, Artificial Sequence
  Artificial Peptide
VHFLLLKY

SEQ ID NO: 907 - protein, 9 aa, Artificial Sequence
  Artificial Peptide
VKISGGPHI

SEQ ID NO: 908 - protein, 11 aa, Artificial Sequence
  Artificial Peptide
VKISGGPHISY

SEQ ID NO: 909 - protein, 10 aa, Artificial Sequence
  Artificial Peptide
VKVLHHMVKI

SEQ ID NO: 910 - protein, 8 aa, Artificial Sequence
  Artificial Peptide
AAISRKMV

SEQ ID NO: 911 - protein, 10 aa, Artificial Sequence
  Artificial Peptide
AAISRKMVEL

SEQ ID NO: 912 - protein, 11 aa, Artificial Sequence
  Artificial Peptide
AAISRKMVELV

SEQ ID NO: 913 - protein, 8 aa, Artificial Sequence
  Artificial Peptide
ASEYLQLV

SEQ ID NO: 914 - protein, 9 aa, Artificial Sequence
  Artificial Peptide
ASEYLQLVF

SEQ ID NO: 915 - protein, 11 aa, Artificial Sequence
  Artificial Peptide
ASEYLQLVFGI

SEQ ID NO: 916 - protein, 8 aa, Artificial Sequence
  Artificial Peptide
ASSFSTTI

SEQ ID NO: 917 - protein, 10 aa, Artificial Sequence
  Artificial Peptide
ASSFSTTINY

SEQ ID NO: 918 - protein, 8 aa, Artificial Sequence
  Artificial Peptide
ASSSSTLV

SEQ ID NO: 919 - protein, 10 aa, Artificial Sequence
  Artificial Peptide
ASSSSTLVEV

SEQ ID NO: 920 - protein, 8 aa, Artificial Sequence
  Artificial Peptide
CAPEEKIW

SEQ ID NO: 921 - protein, 11 aa, Artificial Sequence
  Artificial Peptide
CAPEEKIWEEL

SEQ ID NO: 922 - protein, 10 aa, Artificial Sequence
  Artificial Peptide
DSVFAHPRKL

SEQ ID NO: 923 - protein, 11 aa, Artificial Sequence
  Artificial Peptide
DSVFAHPRKLL

SEQ ID NO: 924 - protein, 9 aa, Artificial Sequence
  Artificial Peptide
EARGEALGL

SEQ ID NO: 925 - protein, 10 aa, Artificial Sequence
  Artificial Peptide
EARGEALGLV

SEQ ID NO: 926 - protein, 8 aa, Artificial Sequence
  Artificial Peptide
ESEFQAAI

SEQ ID NO: 927 - protein, 10 aa, Artificial Sequence
  Artificial Peptide
ESVLRNCQDF

SEQ ID NO: 928 - protein, 11 aa, Artificial Sequence
  Artificial Peptide
ESVLRNCQDFF

SEQ ID NO: 929 - protein, 8 aa, Artificial Sequence
  Artificial Peptide
ETSYVKVL

SEQ ID NO: 930 - protein, 8 aa, Artificial Sequence
  Artificial Peptide
FAHPRKLL

SEQ ID NO: 931 - protein, 9 aa, Artificial Sequence
  Artificial Peptide
FAHPRKLLM

SEQ ID NO: 932 - protein, 8 aa, Artificial Sequence
  Artificial Peptide
FSKASEYL

SEQ ID NO: 933 - protein, 10 aa, Artificial Sequence
  Artificial Peptide
FSKASEYLQL

SEQ ID NO: 934 - protein, 11 aa, Artificial Sequence
  Artificial Peptide
FSKASEYLQLV

SEQ ID NO: 935 - protein, 9 aa, Artificial Sequence
  Artificial Peptide
FSTTINYTL

SEQ ID NO: 936 - protein, 10 aa, Artificial Sequence
  Artificial Peptide
FSTTINYTLW

SEQ ID NO: 937 - protein, 9 aa, Artificial Sequence
  Artificial Peptide
GASSFSTTI

SEQ ID NO: 938 - protein, 11 aa, Artificial Sequence
  Artificial Peptide
GASSFSTTINY

SEQ ID NO: 939 - protein, 9 aa, Artificial Sequence
  Artificial Peptide
GSDPACYEF

SEQ ID NO: 940 - protein, 10 aa, Artificial Sequence
  Artificial Peptide
GSDPACYEFL

SEQ ID NO: 941 - protein, 11 aa, Artificial Sequence
  Artificial Peptide
GSDPACYEFLW

SEQ ID NO: 942 - protein, 9 aa, Artificial Sequence
  Artificial Peptide
HSPQGASSF

SEQ ID NO: 943 - protein, 11 aa, Artificial Sequence
  Artificial Peptide
HTLKIGGEPHI

SEQ ID NO: 944 - protein, 8 aa, Artificial Sequence
  Artificial Peptide
ISHLYILV

SEQ ID NO: 945 - protein, 11 aa, Artificial Sequence
  Artificial Peptide
ISHLYILVTCL

SEQ ID NO: 946 - protein, 8 aa, Artificial Sequence
  Artificial Peptide
ISRKMVEL

SEQ ID NO: 947 - protein, 9 aa, Artificial Sequence
  Artificial Peptide
ISRKMVELV

SEQ ID NO: 948 - protein, 11 aa, Artificial Sequence
  Artificial Peptide
ISRKMVELVHF

SEQ ID NO: 949 - protein, 11 aa, Artificial Sequence
  Artificial Peptide
ISYPPLHERAL

SEQ ID NO: 950 - protein, 8 aa, Artificial Sequence
  Artificial Peptide
KAEMLESV

SEQ ID NO: 951 - protein, 9 aa, Artificial Sequence
  Artificial Peptide
KAEMLESVL

SEQ ID NO: 952 - protein, 8 aa, Artificial Sequence
  Artificial Peptide
KASEYLQL

SEQ ID NO: 953 - protein, 9 aa, Artificial Sequence
  Artificial Peptide
KASEYLQLV

SEQ ID NO: 954 - protein, 10 aa, Artificial Sequence
  Artificial Peptide
KASEYLQLVF

SEQ ID NO: 955 - protein, 8 aa, Artificial Sequence
  Artificial Peptide
KTGLLIIV

SEQ ID NO: 956 - protein, 9 aa, Artificial Sequence
  Artificial Peptide
KTGLLIIVL

SEQ ID NO: 957 - protein, 11 aa, Artificial Sequence
  Artificial Peptide
KTGLLIIVLAI

SEQ ID NO: 958 - protein, 8 aa, Artificial Sequence
  Artificial Peptide
PACYEFLW

SEQ ID NO: 959 - protein, 8 aa, Artificial Sequence
  Artificial Peptide
QAAISRKM

SEQ ID NO: 960 - protein, 9 aa, Artificial Sequence
  Artificial Peptide
QAAISRKMV

SEQ ID NO: 961 - protein, 11 aa, Artificial Sequence
  Artificial Peptide
QAAISRKMVEL

SEQ ID NO: 962 - protein, 9 aa, Artificial Sequence
  Artificial Peptide
QTASSSSTL

SEQ ID NO: 963 - protein, 10 aa, Artificial Sequence
  Artificial Peptide
QTASSSSTLV

SEQ ID NO: 964 - protein, 8 aa, Artificial Sequence
  Artificial Peptide
RALIETSY

SEQ ID NO: 965 - protein, 9 aa, Artificial Sequence
  Artificial Peptide
RALIETSYV

SEQ ID NO: 966 - protein, 11 aa, Artificial Sequence
  Artificial Peptide
RALIETSYVKV

SEQ ID NO: 967 - protein, 11 aa, Artificial Sequence
  Artificial Peptide
RAREPVTKAEM

SEQ ID NO: 968 - protein, 11 aa, Artificial Sequence
  Artificial Peptide
RSQHCKPEEGL

SEQ ID NO: 969 - protein, 9 aa, Artificial Sequence
  Artificial Peptide
SSFSTTINY

SEQ ID NO: 970 - protein, 11 aa, Artificial Sequence
  Artificial Peptide
SSFSTTINYTL

SEQ ID NO: 971 - protein, 11 aa, Artificial Sequence
  Artificial Peptide
SSNQEEEGPRM

SEQ ID NO: 972 - protein, 9 aa, Artificial Sequence
  Artificial Peptide
SSSSTLVEV

SEQ ID NO: 973 - protein, 11 aa, Artificial Sequence
  Artificial Peptide
SSSSTLVEVTL

SEQ ID NO: 974 - protein, 8 aa, Artificial Sequence
  Artificial Peptide
SSSTLVEV

SEQ ID NO: 975 - protein, 10 aa, Artificial Sequence
  Artificial Peptide
SSSTLVEVTL

SEQ ID NO: 976 - protein, 9 aa, Artificial Sequence
  Artificial Peptide
SSTLVEVTL

SEQ ID NO: 977 - protein, 8 aa, Artificial Sequence
  Artificial Peptide
STLVEVTL

SEQ ID NO: 978 - protein, 11 aa, Artificial Sequence
  Artificial Peptide
STLVEVTLGEV

SEQ ID NO: 979 - protein, 8 aa, Artificial Sequence
  Artificial Peptide
STTINYTL

SEQ ID NO: 980 - protein, 9 aa, Artificial Sequence
  Artificial Peptide
STTINYTLW

SEQ ID NO: 981 - protein, 8 aa, Artificial Sequence
  Artificial Peptide
TASSSSTL

SEQ ID NO: 982 - protein, 9 aa, Artificial Sequence
  Artificial Peptide
TASSSSTLV

SEQ ID NO: 983 - protein, 11 aa, Artificial Sequence
  Artificial Peptide
TASSSSTLVEV

SEQ ID NO: 984 - protein, 11 aa, Artificial Sequence
  Artificial Peptide
TSYVKVLHHTL

SEQ ID NO: 985 - protein, 8 aa, Artificial Sequence
  Artificial Peptide
TTINYTLW

SEQ ID NO: 986 - protein, 8 aa, Artificial Sequence
  Artificial Peptide
VTCLGLSY

SEQ ID NO: 987 - protein, 11 aa, Artificial Sequence
  Artificial Peptide
VTCLGLSYDGL

SEQ ID NO: 988 - protein, 10 aa, Artificial Sequence
  Artificial Peptide
VTKAEMLESV

SEQ ID NO: 989 - protein, 11 aa, Artificial Sequence
  Artificial Peptide
VTKAEMLESVL

SEQ ID NO: 990 - protein, 10 aa, Artificial Sequence
  Artificial Peptide
AALSRKVAEL

SEQ ID NO: 991 - protein, 11 aa, Artificial Sequence
  Artificial Peptide
AALSRKVAELV

SEQ ID NO: 992 - protein, 8 aa, Artificial Sequence
  Artificial Peptide
AASSSSTL

SEQ ID NO: 993 - protein, 9 aa, Artificial Sequence
  Artificial Peptide
AASSSSTLV

SEQ ID NO: 994 - protein, 11 aa, Artificial Sequence
  Artificial Peptide
AASSSSTLVEV

SEQ ID NO: 995 - protein, 8 aa, Artificial Sequence
  Artificial Peptide
ASSLPTTM

SEQ ID NO: 996 - protein, 10 aa, Artificial Sequence
  Artificial Peptide
ASSLPTTMNY

SEQ ID NO: 997 - protein, 8 aa, Artificial Sequence
  Artificial Peptide
ASSSLQLV

SEQ ID NO: 998 - protein, 9 aa, Artificial Sequence
  Artificial Peptide
ASSSLQLVF

SEQ ID NO: 999 - protein, 11 aa, Artificial Sequence
  Artificial Peptide
ASSSLQLVFGI

SEQ ID NO: 1000 - protein, 8 aa, Artificial Sequence
  Artificial Peptide
ASSSSTLV

SEQ ID NO: 1001 - protein, 10 aa, Artificial Sequence
  Artificial Peptide
ASSSSTLVEV

SEQ ID NO: 1002 - protein, 8 aa, Artificial Sequence
  Artificial Peptide
ATCLGLSY

SEQ ID NO: 1003 - protein, 11 aa, Artificial Sequence
  Artificial Peptide
ATCLGLSYDGL

SEQ ID NO: 1004 - protein, 8 aa, Artificial Sequence
  Artificial Peptide
CAPEEKIW

SEQ ID NO: 1005 - protein, 11 aa, Artificial Sequence
  Artificial Peptide
CAPEEKIWEEL

SEQ ID NO: 1006 - protein, 10 aa, Artificial Sequence
  Artificial Peptide
DSILGDPKKL

SEQ ID NO: 1007 - protein, 11 aa, Artificial Sequence
  Artificial Peptide
DSILGDPKKLL

SEQ ID NO: 1008 - protein, 9 aa, Artificial Sequence
  Artificial Peptide
EAASSSSTL

SEQ ID NO: 1009 - protein, 10 aa, Artificial Sequence
  Artificial Peptide
EAASSSSTLV

SEQ ID NO: 1010 - protein, 9 aa, Artificial Sequence
  Artificial Peptide
EARGEALGL

SEQ ID NO: 1011 - protein, 10 aa, Artificial Sequence
  Artificial Peptide
EARGEALGLV

SEQ ID NO: 1012 - protein, 8 aa, Artificial Sequence
  Artificial Peptide
ESEFQAAL

SEQ ID NO: 1013 - protein, 8 aa, Artificial Sequence
  Artificial Peptide
ETSYVKVL

SEQ ID NO: 1014 - protein, 11 aa, Artificial Sequence
  Artificial Peptide
ETSYVKVLHHM

SEQ ID NO: 1015 - protein, 9 aa, Artificial Sequence
  Artificial Peptide
FATCLGLSY

SEQ ID NO: 1016 - protein, 8 aa, Artificial Sequence
  Artificial Peptide
FSKASSSL

SEQ ID NO: 1017 - protein, 10 aa, Artificial Sequence
  Artificial Peptide
FSKASSSLQL

SEQ ID NO: 1018 - protein, 11 aa, Artificial Sequence
  Artificial Peptide
FSKASSSLQLV

SEQ ID NO: 1019 - protein, 9 aa, Artificial Sequence
  Artificial Peptide
GASSLPTTM

SEQ ID NO: 1020 - protein, 11 aa, Artificial Sequence
  Artificial Peptide
GASSLPTTMNY

SEQ ID NO: 1021 - protein, 9 aa, Artificial Sequence
  Artificial Peptide
GSDPACYEF

SEQ ID NO: 1022 - protein, 10 aa, Artificial Sequence
  Artificial Peptide
GSDPACYEFL

SEQ ID NO: 1023 - protein, 11 aa, Artificial Sequence
  Artificial Peptide
GSDPACYEFLW

SEQ ID NO: 1024 - protein, 9 aa, Artificial Sequence
  Artificial Peptide
GSVVGNWQY

SEQ ID NO: 1025 - protein, 10 aa, Artificial Sequence
  Artificial Peptide
GSVVGNWQYF

SEQ ID NO: 1026 - protein, 11 aa, Artificial Sequence
  Artificial Peptide
GSVVGNWQYFF

SEQ ID NO: 1027 - protein, 9 aa, Artificial Sequence
  Artificial Peptide
ISGGPHISY

SEQ ID NO: 1028 - protein, 9 aa, Artificial Sequence
  Artificial Peptide
ISYPPLHEW

SEQ ID NO: 1029 - protein, 10 aa, Artificial Sequence
  Artificial Peptide
ISYPPLHEWV

SEQ ID NO: 1030 - protein, 11 aa, Artificial Sequence
  Artificial Peptide
ISYPPLHEWVL

SEQ ID NO: 1031 - protein, 8 aa, Artificial Sequence
  Artificial Peptide
KAEMLGSV

SEQ ID NO: 1032 - protein, 9 aa, Artificial Sequence
  Artificial Peptide
KAEMLGSVV

SEQ ID NO: 1033 - protein, 8 aa, Artificial Sequence
  Artificial Peptide
KAGLLIIV

SEQ ID NO: 1034 - protein, 9 aa, Artificial Sequence
  Artificial Peptide
KAGLLIIVL

SEQ ID NO: 1035 - protein, 11 aa, Artificial Sequence
  Artificial Peptide
KAGLLIIVLAI

SEQ ID NO: 1036 - protein, 8 aa, Artificial Sequence
  Artificial Peptide
KASSSLQL

SEQ ID NO: 1037 - protein, 9 aa, Artificial Sequence
  Artificial Peptide
KASSSLQLV

SEQ ID NO: 1038 - protein, 10 aa, Artificial Sequence
  Artificial Peptide
KASSSLQLVF

SEQ ID NO: 1039 - protein, 8 aa, Artificial Sequence
  Artificial Peptide
LSRKVAEL

SEQ ID NO: 1040 - protein, 9 aa, Artificial Sequence
  Artificial Peptide
LSRKVAELV

SEQ ID NO: 1041 - protein, 11 aa, Artificial Sequence
  Artificial Peptide
LSRKVAELVHF

SEQ ID NO: 1042 - protein, 10 aa, Artificial Sequence
  Artificial Peptide
LTQHFVQENY

SEQ ID NO: 1043 - protein, 11 aa, Artificial Sequence
  Artificial Peptide
LTQHFVQENYL

SEQ ID NO: 1044 - protein, 8 aa, Artificial Sequence
  Artificial Peptide
PACYEFLW

SEQ ID NO: 1045 - protein, 11 aa, Artificial Sequence
  Artificial Peptide
PSTFPDLESEF

SEQ ID NO: 1046 - protein, 8 aa, Artificial Sequence
  Artificial Peptide
PTTMNYPL

SEQ ID NO: 1047 - protein, 9 aa, Artificial Sequence
  Artificial Peptide
PTTMNYPLW

SEQ ID NO: 1048 - protein, 8 aa, Artificial Sequence
  Artificial Peptide
QAALSRKV

SEQ ID NO: 1049 - protein, 11 aa, Artificial Sequence
  Artificial Peptide
QAALSRKVAEL

SEQ ID NO: 1050 - protein, 9 aa, Artificial Sequence
  Artificial Peptide
QSPQGASSL

SEQ ID NO: 1051 - protein, 8 aa, Artificial Sequence
  Artificial Peptide
RALVETSY

SEQ ID NO: 1052 - protein, 9 aa, Artificial Sequence
  Artificial Peptide
RALVETSYV

SEQ ID NO: 1053 - protein, 11 aa, Artificial Sequence
  Artificial Peptide
RALVETSYVKV

SEQ ID NO: 1054 - protein, 11 aa, Artificial Sequence
  Artificial Peptide
RAREPVTKAEM

SEQ ID NO: 1055 - protein, 11 aa, Artificial Sequence
  Artificial Peptide
RSQHCKPEEGL

SEQ ID NO: 1056 - protein, 9 aa, Artificial Sequence
  Artificial Peptide
SSLPTTMNY

SEQ ID NO: 1057 - protein, 11 aa, Artificial Sequence
  Artificial Peptide
SSLPTTMNYPL

SEQ ID NO: 1058 - protein, 9 aa, Artificial Sequence
  Artificial Peptide
SSLQLVFGI

SEQ ID NO: 1059 - protein, 11 aa, Artificial Sequence
  Artificial Peptide
SSLQLVFGIEL

SEQ ID NO: 1060 - protein, 8 aa, Artificial Sequence
  Artificial Peptide
SSSLQLVF

SEQ ID NO: 1061 - protein, 10 aa, Artificial Sequence
  Artificial Peptide
SSSLQLVFGI

SEQ ID NO: 1062 - protein, 9 aa, Artificial Sequence
  Artificial Peptide
SSSSTLVEV

SEQ ID NO: 1063 - protein, 11 aa, Artificial Sequence
  Artificial Peptide
SSSSTLVEVTL

SEQ ID NO: 1064 - protein, 8 aa, Artificial Sequence
  Artificial Peptide
SSSTLVEV

SEQ ID NO: 1065 - protein, 10 aa, Artificial Sequence
  Artificial Peptide
SSSTLVEVTL

SEQ ID NO: 1066 - protein, 9 aa, Artificial Sequence
  Artificial Peptide
SSTLVEVTL

SEQ ID NO: 1067 - protein, 10 aa, Artificial Sequence
  Artificial Peptide
STFPDLESEF

SEQ ID NO: 1068 - protein, 8 aa, Artificial Sequence
  Artificial Peptide
STLVEVTL

SEQ ID NO: 1069 - protein, 11 aa, Artificial Sequence
  Artificial Peptide
STLVEVTLGEV

SEQ ID NO: 1070 - protein, 10 aa, Artificial Sequence
  Artificial Peptide
TSYVKVLHHM

SEQ ID NO: 1071 - protein, 11 aa, Artificial Sequence
  Artificial Peptide
TSYVKVLHHMV

SEQ ID NO: 1072 - protein, 8 aa, Artificial Sequence
  Artificial Peptide
TTMNYPLW

SEQ ID NO: 1073 - protein, 8 aa, Artificial Sequence
  Artificial Peptide
VAELVHFL

SEQ ID NO: 1074 - protein, 9 aa, Artificial Sequence
  Artificial Peptide
VAELVHFLL

SEQ ID NO: 1075 - protein, 10 aa, Artificial Sequence
  Artificial Peptide
VAELVHFLLL

SEQ ID NO: 1076 - protein, 10 aa, Artificial Sequence
  Artificial Peptide
VTKAEMLGSV

SEQ ID NO: 1077 - protein, 11 aa, Artificial Sequence
  Artificial Peptide
VTKAEMLGSVV

SEQ ID NO: 1078 - protein, 10 aa, Artificial Sequence
  Artificial Peptide
AISRKMVELV

SEQ ID NO: 1079 - protein, 8 aa, Artificial Sequence
  Artificial Peptide
ALIETSYV

SEQ ID NO: 1080 - protein, 10 aa, Artificial Sequence
  Artificial Peptide
ALIETSYVKV

SEQ ID NO: 1081 - protein, 8 aa, Artificial Sequence
  Artificial Peptide
CQDFFPVI

SEQ ID NO: 1082 - protein, 9 aa, Artificial Sequence
  Artificial Peptide
CQDFFPVIF

SEQ ID NO: 1083 - protein, 10 aa, Artificial Sequence
  Artificial Peptide
DLESEFQAAI

SEQ ID NO: 1084 - protein, 10 aa, Artificial Sequence
  Artificial Peptide
DLVQENYLEY

SEQ ID NO: 1085 - protein, 9 aa, Artificial Sequence
  Artificial Peptide
DPACYEFLW

SEQ ID NO: 1086 - protein, 8 aa, Artificial Sequence
  Artificial Peptide
ELSMLEVF

SEQ ID NO: 1087 - protein, 10 aa, Artificial Sequence
  Artificial Peptide
ELVHFLLLKY

SEQ ID NO: 1088 - protein, 8 aa, Artificial Sequence
  Artificial Peptide
EPVTKAEM

SEQ ID NO: 1089 - protein, 10 aa, Artificial Sequence
  Artificial Peptide
EVFEGREDSV

SEQ ID NO: 1090 - protein, 11 aa, Artificial Sequence
  Artificial Peptide
EVFEGREDSVF

SEQ ID NO: 1091 - protein, 8 aa, Artificial Sequence
  Artificial Peptide
EVVEVVPI

SEQ ID NO: 1092 - protein, 9 aa, Artificial Sequence
  Artificial Peptide
EVVPISHLY

SEQ ID NO: 1093 - protein, 10 aa, Artificial Sequence
  Artificial Peptide
EVVPISHLYI

SEQ ID NO: 1094 - protein, 9 aa, Artificial Sequence
  Artificial Peptide
FLWGPRALI

SEQ ID NO: 1095 - protein, 8 aa, Artificial Sequence
  Artificial Peptide
FPDLESEF

SEQ ID NO: 1096 - protein, 11 aa, Artificial Sequence
  Artificial Peptide
FPVIFSKASEY

SEQ ID NO: 1097 - protein, 9 aa, Artificial Sequence
  Artificial Peptide
FQAAISRKM

SEQ ID NO: 1098 - protein, 10 aa, Artificial Sequence
  Artificial Peptide
FQAAISRKMV

SEQ ID NO: 1099 - protein, 8 aa, Artificial Sequence
  Artificial Peptide
GIEVVEVV

SEQ ID NO: 1100 - protein, 10 aa, Artificial Sequence
  Artificial Peptide
GIEVVEVVPI

SEQ ID NO: 1101 - protein, 8 aa, Artificial Sequence
  Artificial Peptide
GLLGDNQV

SEQ ID NO: 1102 - protein, 9 aa, Artificial Sequence
  Artificial Peptide
GLLGDNQVM

SEQ ID NO: 1103 - protein, 9 aa, Artificial Sequence
  Artificial Peptide
GLLIIVLAI

SEQ ID NO: 1104 - protein, 10 aa, Artificial Sequence
  Artificial Peptide
GLLIIVLAII

SEQ ID NO: 1105 - protein, 10 aa, Artificial Sequence
  Artificial Peptide
GPRALIETSY

SEQ ID NO: 1106 - protein, 11 aa, Artificial Sequence
  Artificial Peptide
GPRALIETSYV

SEQ ID NO: 1107 - protein, 11 aa, Artificial Sequence
  Artificial Peptide
HPRKLLMQDLV

SEQ ID NO: 1108 - protein, 9 aa, Artificial Sequence
  Artificial Peptide
IIVLAIIAI

SEQ ID NO: 1109 - protein, 10 aa, Artificial Sequence
  Artificial Peptide
ILVTCLGLSY

SEQ ID NO: 1110 - protein, 8 aa, Artificial Sequence
  Artificial Peptide
IVLAIIAI

SEQ ID NO: 1111 - protein, 8 aa, Artificial Sequence
  Artificial Peptide
KIGGEPHI

SEQ ID NO: 1112 - protein, 10 aa, Artificial Sequence
  Artificial Peptide
KIGGEPHISY

SEQ ID NO: 1113 - protein, 8 aa, Artificial Sequence
  Artificial Peptide
KIWEELSM

SEQ ID NO: 1114 - protein, 11 aa, Artificial Sequence
  Artificial Peptide
KIWEELSMLEV

SEQ ID NO: 1115 - protein, 8 aa, Artificial Sequence
  Artificial Peptide
KLLMQDLV

SEQ ID NO: 1116 - protein, 8 aa, Artificial Sequence
  Artificial Peptide
KMVELVHF

SEQ ID NO: 1117 - protein, 9 aa, Artificial Sequence
  Artificial Peptide
KVLHHTLKI

SEQ ID NO: 1118 - protein, 9 aa, Artificial Sequence
  Artificial Peptide
LIETSYVKV

SEQ ID NO: 1119 - protein, 8 aa, Artificial Sequence
  Artificial Peptide
LIIVLAII

SEQ ID NO: 1120 - protein, 10 aa, Artificial Sequence
  Artificial Peptide
LIIVLAIIAI

SEQ ID NO: 1121 - protein, 8 aa, Artificial Sequence
  Artificial Peptide
LLGDNQVM

SEQ ID NO: 1122 - protein, 8 aa, Artificial Sequence
  Artificial Peptide
LLIIVLAI

SEQ ID NO: 1123 - protein, 9 aa, Artificial Sequence
  Artificial Peptide
LLIIVLAII

SEQ ID NO: 1124 - protein, 11 aa, Artificial Sequence
  Artificial Peptide
LLIIVLAIIAI

SEQ ID NO: 1125 - protein, 10 aa, Artificial Sequence
  Artificial Peptide
LLKYRAREPV

SEQ ID NO: 1126 - protein, 11 aa, Artificial Sequence
  Artificial Peptide
LLLKYRAREPV

SEQ ID NO: 1127 - protein, 11 aa, Artificial Sequence
  Artificial Peptide
LLMQDLVQENY

SEQ ID NO: 1128 - protein, 10 aa, Artificial Sequence
  Artificial Peptide
LMQDLVQENY

SEQ ID NO: 1129 - protein, 9 aa, Artificial Sequence
  Artificial Peptide
LQLVFGIEV

SEQ ID NO: 1130 - protein, 10 aa, Artificial Sequence
  Artificial Peptide
LQLVFGIEVV

SEQ ID NO: 1131 - protein, 9 aa, Artificial Sequence
  Artificial Peptide
LVEVTLGEV

SEQ ID NO: 1132 - protein, 8 aa, Artificial Sequence
  Artificial Peptide
LVFGIEVV

SEQ ID NO: 1133 - protein, 10 aa, Artificial Sequence
  Artificial Peptide
LVFGIEVVEV

SEQ ID NO: 1134 - protein, 11 aa, Artificial Sequence
  Artificial Peptide
LVFGIEVVEVV

SEQ ID NO: 1135 - protein, 9 aa, Artificial Sequence
  Artificial Peptide
LVHFLLLKY

SEQ ID NO: 1136 - protein, 9 aa, Artificial Sequence
  Artificial Peptide
LVQENYLEY

SEQ ID NO: 1137 - protein, 9 aa, Artificial Sequence
  Artificial Peptide
LVTCLGLSY

SEQ ID NO: 1138 - protein, 8 aa, Artificial Sequence
  Artificial Peptide
MPKTGLLI

SEQ ID NO: 1139 - protein, 9 aa, Artificial Sequence
  Artificial Peptide
MPKTGLLII

SEQ ID NO: 1140 - protein, 10 aa, Artificial Sequence
  Artificial Peptide
MPKTGLLIIV

SEQ ID NO: 1141 - protein, 9 aa, Artificial Sequence
  Artificial Peptide
MQDLVQENY

SEQ ID NO: 1142 - protein, 9 aa, Artificial Sequence
  Artificial Peptide
NQEEEGPRM

SEQ ID NO: 1143 - protein, 10 aa, Artificial Sequence
  Artificial Peptide
NQEEEGPRMF

SEQ ID NO: 1144 - protein, 11 aa, Artificial Sequence
  Artificial Peptide
NQVMPKTGLLI

SEQ ID NO: 1145 - protein, 9 aa, Artificial Sequence
  Artificial Peptide
PISHLYILV

SEQ ID NO: 1146 - protein, 11 aa, Artificial Sequence
  Artificial Peptide
PPHSPQGASSF

SEQ ID NO: 1147 - protein, 11 aa, Artificial Sequence
  Artificial Peptide
PQGASSFSTTI

SEQ ID NO: 1148 - protein, 10 aa, Artificial Sequence
  Artificial Peptide
PVIFSKASEY

SEQ ID NO: 1149 - protein, 11 aa, Artificial Sequence
  Artificial Peptide
PVTKAEMLESV

SEQ ID NO: 1150 - protein, 8 aa, Artificial Sequence
  Artificial Peptide
QLVFGIEV

SEQ ID NO: 1151 - protein, 9 aa, Artificial Sequence
  Artificial Peptide
QLVFGIEVV

SEQ ID NO: 1152 - protein, 11 aa, Artificial Sequence
  Artificial Peptide
QLVFGIEVVEV

SEQ ID NO: 1153 - protein, 11 aa, Artificial Sequence
  Artificial Peptide
QQTASSSSTLV

SEQ ID NO: 1154 - protein, 10 aa, Artificial Sequence
  Artificial Peptide
QVMPKTGLLI

SEQ ID NO: 1155 - protein, 11 aa, Artificial Sequence
  Artificial Peptide
QVMPKTGLLII

SEQ ID NO: 1156 - protein, 10 aa, Artificial Sequence
  Artificial Peptide
QVPGSDPACY

SEQ ID NO: 1157 - protein, 10 aa, Artificial Sequence
  Artificial Peptide
RMFPDLESEF

SEQ ID NO: 1158 - protein, 11 aa, Artificial Sequence
  Artificial Peptide
RQVPGSDPACY

SEQ ID NO: 1159 - protein, 8 aa, Artificial Sequence
  Artificial Peptide
SPQGASSF

SEQ ID NO: 1160 - protein, 11 aa, Artificial Sequence
  Artificial Peptide
SVFAHPRKLLM

SEQ ID NO: 1161 - protein, 9 aa, Artificial Sequence
  Artificial Peptide
SVLRNCQDF

SEQ ID NO: 1162 - protein, 10 aa, Artificial Sequence
  Artificial Peptide
SVLRNCQDFF

SEQ ID NO: 1163 - protein, 10 aa, Artificial Sequence
  Artificial Peptide
TLKIGGEPHI

SEQ ID NO: 1164 - protein, 10 aa, Artificial Sequence
  Artificial Peptide
TLVEVTLGEV

SEQ ID NO: 1165 - protein, 9 aa, Artificial Sequence
  Artificial Peptide
VIFSKASEY

SEQ ID NO: 1166 - protein, 8 aa, Artificial Sequence
  Artificial Peptide
VLHHTLKI

SEQ ID NO: 1167 - protein, 8 aa, Artificial Sequence
  Artificial Peptide
VLRNCQDF

SEQ ID NO: 1168 - protein, 9 aa, Artificial Sequence
  Artificial Peptide
VLRNCQDFF

SEQ ID NO: 1169 - protein, 11 aa, Artificial Sequence
  Artificial Peptide
VLRNCQDFFPV

SEQ ID NO: 1170 - protein, 9 aa, Artificial Sequence
  Artificial Peptide
VMPKTGLLI

SEQ ID NO: 1171 - protein, 10 aa, Artificial Sequence
  Artificial Peptide
VMPKTGLLII

SEQ ID NO: 1172 - protein, 11 aa, Artificial Sequence
  Artificial Peptide
VMPKTGLLIIV

SEQ ID NO: 1173 - protein, 9 aa, Artificial Sequence
  Artificial Peptide
VPGSDPACY

SEQ ID NO: 1174 - protein, 11 aa, Artificial Sequence
  Artificial Peptide
VPGSDPACYEF

SEQ ID NO: 1175 - protein, 8 aa, Artificial Sequence
  Artificial Peptide
VPISHLYI

SEQ ID NO: 1176 - protein, 10 aa, Artificial Sequence
  Artificial Peptide
VPISHLYILV

SEQ ID NO: 1177 - protein, 8 aa, Artificial Sequence
  Artificial Peptide
VQENYLEY

SEQ ID NO: 1178 - protein, 11 aa, Artificial Sequence
  Artificial Peptide
VQENYLEYRQV

SEQ ID NO: 1179 - protein, 11 aa, Artificial Sequence
  Artificial Peptide
VVEVVPISHLY

SEQ ID NO: 1180 - protein, 8 aa, Artificial Sequence
  Artificial Peptide
VVPISHLY

SEQ ID NO: 1181 - protein, 9 aa, Artificial Sequence
  Artificial Peptide
VVPISHLYI

SEQ ID NO: 1182 - protein, 11 aa, Artificial Sequence
  Artificial Peptide
VVPISHLYILV

SEQ ID NO: 1183 - protein, 11 aa, Artificial Sequence
  Artificial Peptide
YILVTCLGLSY

SEQ ID NO: 1184 - protein, 8 aa, Artificial Sequence
  Artificial Peptide
YLQLVFGI

SEQ ID NO: 1185 - protein, 10 aa, Artificial Sequence
  Artificial Peptide
YLQLVFGIEV

SEQ ID NO: 1186 - protein, 11 aa, Artificial Sequence
  Artificial Peptide
YLQLVFGIEVV

SEQ ID NO: 1187 - protein, 11 aa, Artificial Sequence
  Artificial Peptide
YVKVLHHTLKI

SEQ ID NO: 1188 - protein, 10 aa, Artificial Sequence
  Artificial Peptide
ALSRKVAELV

SEQ ID NO: 1189 - protein, 8 aa, Artificial Sequence
  Artificial Peptide
ALVETSYV

SEQ ID NO: 1190 - protein, 10 aa, Artificial Sequence
  Artificial Peptide
ALVETSYVKV

SEQ ID NO: 1191 - protein, 9 aa, Artificial Sequence
  Artificial Peptide
DPACYEFLW

SEQ ID NO: 1192 - protein, 8 aa, Artificial Sequence
  Artificial Peptide
DPIGHLYI

SEQ ID NO: 1193 - protein, 9 aa, Artificial Sequence
  Artificial Peptide
DPIGHLYIF

SEQ ID NO: 1194 - protein, 10 aa, Artificial Sequence
  Artificial Peptide
DPKKLLTQHF

SEQ ID NO: 1195 - protein, 11 aa, Artificial Sequence
  Artificial Peptide
DPKKLLTQHFV

SEQ ID NO: 1196 - protein, 8 aa, Artificial Sequence
  Artificial Peptide
ELMEVDPI

SEQ ID NO: 1197 - protein, 8 aa, Artificial Sequence
  Artificial Peptide
ELSVLEVF

SEQ ID NO: 1198 - protein, 10 aa, Artificial Sequence
  Artificial Peptide
ELVHFLLLKY

SEQ ID NO: 1199 - protein, 10 aa, Artificial Sequence
  Artificial Peptide
EMLGSVVGNW

SEQ ID NO: 1200 - protein, 8 aa, Artificial Sequence
  Artificial Peptide
EPVTKAEM

SEQ ID NO: 1201 - protein, 9 aa, Artificial Sequence
  Artificial Peptide
EVDPIGHLY

SEQ ID NO: 1202 - protein, 10 aa, Artificial Sequence
  Artificial Peptide
EVDPIGHLYI

SEQ ID NO: 1203 - protein, 11 aa, Artificial Sequence
  Artificial Peptide
EVDPIGHLYIF

SEQ ID NO: 1204 - protein, 10 aa, Artificial Sequence
  Artificial Peptide
EVFEGREDSI

SEQ ID NO: 1205 - protein, 9 aa, Artificial Sequence
  Artificial Peptide
FLWGPRALV

SEQ ID NO: 1206 - protein, 8 aa, Artificial Sequence
  Artificial Peptide
FPDLESEF

SEQ ID NO: 1207 - protein, 9 aa, Artificial Sequence
  Artificial Peptide
FQAALSRKV

SEQ ID NO: 1208 - protein, 9 aa, Artificial Sequence
  Artificial Peptide
FVQENYLEY

SEQ ID NO: 1209 - protein, 10 aa, Artificial Sequence
  Artificial Peptide
GIELMEVDPI

SEQ ID NO: 1210 - protein, 8 aa, Artificial Sequence
  Artificial Peptide
GLLGDNQI

SEQ ID NO: 1211 - protein, 9 aa, Artificial Sequence
  Artificial Peptide
GLLGDNQIM

SEQ ID NO: 1212 - protein, 9 aa, Artificial Sequence
  Artificial Peptide
GLLIIVLAI

SEQ ID NO: 1213 - protein, 10 aa, Artificial Sequence
  Artificial Peptide
GLLIIVLAII

SEQ ID NO: 1214 - protein, 10 aa, Artificial Sequence
  Artificial Peptide
GPRALVETSY

SEQ ID NO: 1215 - protein, 11 aa, Artificial Sequence
  Artificial Peptide
GPRALVETSYV

SEQ ID NO: 1216 - protein, 10 aa, Artificial Sequence
  Artificial Peptide
HISYPPLHEW

SEQ ID NO: 1217 - protein, 11 aa, Artificial Sequence
  Artificial Peptide
HISYPPLHEWV

SEQ ID NO: 1218 - protein, 11 aa, Artificial Sequence
  Artificial Peptide
HMVKISGGPHI

SEQ ID NO: 1219 - protein, 9 aa, Artificial Sequence
  Artificial Peptide
IMPKAGLLI

SEQ ID NO: 1220 - protein, 10 aa, Artificial Sequence
  Artificial Peptide
IMPKAGLLII

SEQ ID NO: 1221 - protein, 11 aa, Artificial Sequence
  Artificial Peptide
IMPKAGLLIIV

SEQ ID NO: 1222 - protein, 8 aa, Artificial Sequence
  Artificial Peptide
KISGGPHI

SEQ ID NO: 1223 - protein, 10 aa, Artificial Sequence
  Artificial Peptide
KISGGPHISY

SEQ ID NO: 1224 - protein, 8 aa, Artificial Sequence
  Artificial Peptide
KIWEELSV

SEQ ID NO: 1225 - protein, 11 aa, Artificial Sequence
  Artificial Peptide
KIWEELSVLEV

SEQ ID NO: 1226 - protein, 8 aa, Artificial Sequence
  Artificial Peptide
KLLTQHFV

SEQ ID NO: 1227 - protein, 8 aa, Artificial Sequence
  Artificial Peptide
KVAELVHF

SEQ ID NO: 1228 - protein, 9 aa, Artificial Sequence
  Artificial Peptide
KVLHHMVKI

SEQ ID NO: 1229 - protein, 8 aa, Artificial Sequence
  Artificial Peptide
LIIVLAII

SEQ ID NO: 1230 - protein, 8 aa, Artificial Sequence
  Artificial Peptide
LLGDNQIM

SEQ ID NO: 1231 - protein, 8 aa, Artificial Sequence
  Artificial Peptide
LLIIVLAI

SEQ ID NO: 1232 - protein, 9 aa, Artificial Sequence
  Artificial Peptide
LLIIVLAII

SEQ ID NO: 1233 - protein, 10 aa, Artificial Sequence
  Artificial Peptide
LLKYRAREPV

SEQ ID NO: 1234 - protein, 11 aa, Artificial Sequence
  Artificial Peptide
LLLKYRAREPV

SEQ ID NO: 1235 - protein, 11 aa, Artificial Sequence
  Artificial Peptide
LLTQHFVQENY

SEQ ID NO: 1236 - protein, 11 aa, Artificial Sequence
  Artificial Peptide
LMEVDPIGHLY

SEQ ID NO: 1237 - protein, 10 aa, Artificial Sequence
  Artificial Peptide
LPTTMNYPLW

SEQ ID NO: 1238 - protein, 10 aa, Artificial Sequence
  Artificial Peptide
LQLVFGIELM

SEQ ID NO: 1239 - protein, 9 aa, Artificial Sequence
  Artificial Peptide
LVETSYVKV

SEQ ID NO: 1240 - protein, 9 aa, Artificial Sequence
  Artificial Peptide
LVEVTLGEV

SEQ ID NO: 1241 - protein, 8 aa, Artificial Sequence
  Artificial Peptide
LVFGIELM

SEQ ID NO: 1242 - protein, 10 aa, Artificial Sequence
  Artificial Peptide
LVFGIELMEV

SEQ ID NO: 1243 - protein, 9 aa, Artificial Sequence
  Artificial Peptide
LVHFLLLKY

SEQ ID NO: 1244 - protein, 9 aa, Artificial Sequence
  Artificial Peptide
MLGSVVGNW

SEQ ID NO: 1245 - protein, 11 aa, Artificial Sequence
  Artificial Peptide
MLGSVVGNWQY

SEQ ID NO: 1246 - protein, 8 aa, Artificial Sequence
  Artificial Peptide
MPKAGLLI

SEQ ID NO: 1247 - protein, 9 aa, Artificial Sequence
  Artificial Peptide
MPKAGLLII

SEQ ID NO: 1248 - protein, 10 aa, Artificial Sequence
  Artificial Peptide
MPKAGLLIIV

SEQ ID NO: 1249 - protein, 10 aa, Artificial Sequence
  Artificial Peptide
MVKISGGPHI

SEQ ID NO: 1250 - protein, 10 aa, Artificial Sequence
  Artificial Peptide
NQEEEGPSTF

SEQ ID NO: 1251 - protein, 11 aa, Artificial Sequence
  Artificial Peptide
NQIMPKAGLLI

SEQ ID NO: 1252 - protein, 8 aa, Artificial Sequence
  Artificial Peptide
PIGHLYIF

SEQ ID NO: 1253 - protein, 11 aa, Artificial Sequence
  Artificial Peptide
PQGASSLPTTM

SEQ ID NO: 1254 - protein, 11 aa, Artificial Sequence
  Artificial Peptide
PVTKAEMLGSV

SEQ ID NO: 1255 - protein, 10 aa, Artificial Sequence
  Artificial Peptide
QIMPKAGLLI

SEQ ID NO: 1256 - protein, 11 aa, Artificial Sequence
  Artificial Peptide
QIMPKAGLLII

SEQ ID NO: 1257 - protein, 9 aa, Artificial Sequence
  Artificial Peptide
QLVFGIELM

SEQ ID NO: 1258 - protein, 11 aa, Artificial Sequence
  Artificial Peptide
QLVFGIELMEV

SEQ ID NO: 1259 - protein, 10 aa, Artificial Sequence
  Artificial Peptide
QVPGSDPACY

SEQ ID NO: 1260 - protein, 11 aa, Artificial Sequence
  Artificial Peptide
RQVPGSDPACY

SEQ ID NO: 1261 - protein, 8 aa, Artificial Sequence
  Artificial Peptide
SLPTTMNY

SEQ ID NO: 1262 - protein, 11 aa, Artificial Sequence
  Artificial Peptide
SLPTTMNYPLW

SEQ ID NO: 1263 - protein, 8 aa, Artificial Sequence
  Artificial Peptide
SLQLVFGI

SEQ ID NO: 1264 - protein, 11 aa, Artificial Sequence
  Artificial Peptide
SLQLVFGIELM

SEQ ID NO: 1265 - protein, 8 aa, Artificial Sequence
  Artificial Peptide
SVVGNWQY

SEQ ID NO: 1266 - protein, 9 aa, Artificial Sequence
  Artificial Peptide
SVVGNWQYF

SEQ ID NO: 1267 - protein, 10 aa, Artificial Sequence
  Artificial Peptide
SVVGNWQYFF

SEQ ID NO: 1268 - protein, 10 aa, Artificial Sequence
  Artificial Peptide
TLVEVTLGEV

SEQ ID NO: 1269 - protein, 11 aa, Artificial Sequence
  Artificial Peptide
TMNYPLWSQSY

SEQ ID NO: 1270 - protein, 9 aa, Artificial Sequence
  Artificial Peptide
TQHFVQENY

SEQ ID NO: 1271 - protein, 8 aa, Artificial Sequence
  Artificial Peptide
VLHHMVKI

SEQ ID NO: 1272 - protein, 9 aa, Artificial Sequence
  Artificial Peptide
VPGSDPACY

SEQ ID NO: 1273 - protein, 11 aa, Artificial Sequence
  Artificial Peptide
VPGSDPACYEF

SEQ ID NO: 1274 - protein, 8 aa, Artificial Sequence
  Artificial Peptide
VQENYLEY

SEQ ID NO: 1275 - protein, 11 aa, Artificial Sequence
  Artificial Peptide
VQENYLEYRQV

SEQ ID NO: 1276 - protein, 8 aa, Artificial Sequence
  Artificial Peptide
VVGNWQYF

SEQ ID NO: 1277 - protein, 9 aa, Artificial Sequence
  Artificial Peptide
VVGNWQYFF

SEQ ID NO: 1278 - protein, 11 aa, Artificial Sequence
  Artificial Peptide
VVGNWQYFFPV

SEQ ID NO: 1279 - protein, 8 aa, Artificial Sequence
  Artificial Peptide
WQYFFPVI

SEQ ID NO: 1280 - protein, 9 aa, Artificial Sequence
  Artificial Peptide
WQYFFPVIF

SEQ ID NO: 1281 - protein, 11 aa, Artificial Sequence
  Artificial Peptide
YIFATCLGLSY

SEQ ID NO: 1282 - protein, 8 aa, Artificial Sequence
  Artificial Peptide
YPLWSQSY

SEQ ID NO: 1283 - protein, 8 aa, Artificial Sequence
  Artificial Peptide
YPPLHEWV

SEQ ID NO: 1284 - protein, 8 aa, Artificial Sequence
  Artificial Peptide
YVKVLHHM

SEQ ID NO: 1285 - protein, 9 aa, Artificial Sequence
  Artificial Peptide
YVKVLHHMV

SEQ ID NO: 1286 - protein, 11 aa, Artificial Sequence
  Artificial Peptide
YVKVLHHMVKI

SEQ ID NO: 1287 - protein, 10 aa, Artificial Sequence
  Artificial Peptide
ASSFSTTINY

SEQ ID NO: 1288 - protein, 11 aa, Artificial Sequence
  Artificial Peptide
GASSFSTTINY

SEQ ID NO: 1289 - protein, 8 aa, Artificial Sequence
  Artificial Peptide
GGEPHISY

SEQ ID NO: 1290 - protein, 8 aa, Artificial Sequence
  Artificial Peptide
IFSKASEY

SEQ ID NO: 1291 - protein, 10 aa, Artificial Sequence
  Artificial Peptide
LMQDLVQENY

SEQ ID NO: 1292 - protein, 9 aa, Artificial Sequence
  Artificial Peptide
MQDLVQENY

SEQ ID NO: 1293 - protein, 8 aa, Artificial Sequence
  Artificial Peptide
PGSDPACY

SEQ ID NO: 1294 - protein, 9 aa, Artificial Sequence
  Artificial Peptide
PRALIETSY

SEQ ID NO: 1295 - protein, 8 aa, Artificial Sequence
  Artificial Peptide
SFSTTINY

SEQ ID NO: 1296 - protein, 9 aa, Artificial Sequence
  Artificial Peptide
SSFSTTINY

SEQ ID NO: 1297 - protein, 8 aa, Artificial Sequence
  Artificial Peptide
VQENYLEY

SEQ ID NO: 1298 - protein, 8 aa, Artificial Sequence
  Artificial Peptide
VTCLGLSY

SEQ ID NO: 1299 - protein, 11 aa, Artificial Sequence
  Artificial Peptide
VVEVVPISHLY

SEQ ID NO: 1300 - protein, 10 aa, Artificial Sequence
  Artificial Peptide
ASSLPTTMNY

SEQ ID NO: 1301 - protein, 8 aa, Artificial Sequence
  Artificial Peptide
ATCLGLSY

SEQ ID NO: 1302 - protein, 9 aa, Artificial Sequence
  Artificial Peptide
EVDPIGHLY

SEQ ID NO: 1303 - protein, 11 aa, Artificial Sequence
  Artificial Peptide
GASSLPTTMNY

SEQ ID NO: 1304 - protein, 9 aa, Artificial Sequence
  Artificial Peptide
GSVVGNWQY

SEQ ID NO: 1305 - protein, 10 aa, Artificial Sequence
  Artificial Peptide
IFATCLGLSY

SEQ ID NO: 1306 - protein, 9 aa, Artificial Sequence
  Artificial Peptide
ISGGPHISY

SEQ ID NO: 1307 - protein, 10 aa, Artificial Sequence
  Artificial Peptide
KISGGPHISY

SEQ ID NO: 1308 - protein, 10 aa, Artificial Sequence
  Artificial Peptide
LGSVVGNWQY

SEQ ID NO: 1309 - protein, 11 aa, Artificial Sequence
  Artificial Peptide
LMEVDPIGHLY

SEQ ID NO: 1310 - protein, 10 aa, Artificial Sequence
  Artificial Peptide
LTQHFVQENY

SEQ ID NO: 1311 - protein, 8 aa, Artificial Sequence
  Artificial Peptide
PGSDPACY

SEQ ID NO: 1312 - protein, 9 aa, Artificial Sequence
  Artificial Peptide
PRALVETSY

SEQ ID NO: 1313 - protein, 9 aa, Artificial Sequence
  Artificial Peptide
SSLPTTMNY

SEQ ID NO: 1314 - protein, 11 aa, Artificial Sequence
  Artificial Peptide
TMNYPLWSQSY

SEQ ID NO: 1315 - protein, 8 aa, Artificial Sequence
  Artificial Peptide
VQENYLEY

SEQ ID NO: 1316 - protein, 9 aa, Artificial Sequence
  Artificial Peptide
AADSPSPPH

SEQ ID NO: 1317 - protein, 10 aa, Artificial Sequence
  Artificial Peptide
ACYEFLWGPR

SEQ ID NO: 1318 - protein, 11 aa, Artificial Sequence
  Artificial Peptide
ACYEFLWGPRA

SEQ ID NO: 1319 - protein, 8 aa, Artificial Sequence
  Artificial Peptide
ADSPSPPH

SEQ ID NO: 1320 - protein, 11 aa, Artificial Sequence
  Artificial Peptide
AIEGDCAPEEK

SEQ ID NO: 1321 - protein, 10 aa, Artificial Sequence
  Artificial Peptide
AIIAIEGDCA

SEQ ID NO: 1322 - protein, 11 aa, Artificial Sequence
  Artificial Peptide
AISRKMVELVH

SEQ ID NO: 1323 - protein, 9 aa, Artificial Sequence
  Artificial Peptide
ALGLVGAQA

SEQ ID NO: 1324 - protein, 11 aa, Artificial Sequence
  Artificial Peptide
ALGLVGAQAPA

SEQ ID NO: 1325 - protein, 9 aa, Artificial Sequence
  Artificial Peptide
ALIETSYVK

SEQ ID NO: 1326 - protein, 9 aa, Artificial Sequence
  Artificial Peptide
ASEYLQLVF

SEQ ID NO: 1327 - protein, 10 aa, Artificial Sequence
  Artificial Peptide
ASSFSTTINY

SEQ ID NO: 1328 - protein, 8 aa, Artificial Sequence
  Artificial Peptide
ATEEQQTA

SEQ ID NO: 1329 - protein, 9 aa, Artificial Sequence
  Artificial Peptide
DFFPVIFSK

SEQ ID NO: 1330 - protein, 10 aa, Artificial Sequence
  Artificial Peptide
DFFPVIFSKA

SEQ ID NO: 1331 - protein, 8 aa, Artificial Sequence
  Artificial Peptide
DLESEFQA

SEQ ID NO: 1332 - protein, 9 aa, Artificial Sequence
  Artificial Peptide
DLESEFQAA

SEQ ID NO: 1333 - protein, 10 aa, Artificial Sequence
  Artificial Peptide
DLVQENYLEY

SEQ ID NO: 1334 - protein, 11 aa, Artificial Sequence
  Artificial Peptide
DLVQENYLEYR

SEQ ID NO: 1335 - protein, 8 aa, Artificial Sequence
  Artificial Peptide
DSVFAHPR

SEQ ID NO: 1336 - protein, 9 aa, Artificial Sequence
  Artificial Peptide
DSVFAHPRK

SEQ ID NO: 1337 - protein, 8 aa, Artificial Sequence
  Artificial Peptide
EALGLVGA

SEQ ID NO: 1338 - protein, 10 aa, Artificial Sequence
  Artificial Peptide
EALGLVGAQA

SEQ ID NO: 1339 - protein, 9 aa, Artificial Sequence
  Artificial Peptide
EDSVFAHPR

SEQ ID NO: 1340 - protein, 10 aa, Artificial Sequence
  Artificial Peptide
EDSVFAHPRK

SEQ ID NO: 1341 - protein, 8 aa, Artificial Sequence
  Artificial Peptide
EFLWGPRA

SEQ ID NO: 1342 - protein, 8 aa, Artificial Sequence
  Artificial Peptide
EFQAAISR

SEQ ID NO: 1343 - protein, 9 aa, Artificial Sequence
  Artificial Peptide
EFQAAISRK

SEQ ID NO: 1344 - protein, 9 aa, Artificial Sequence
  Artificial Peptide
EGDCAPEEK

SEQ ID NO: 1345 - protein, 9 aa, Artificial Sequence
  Artificial Peptide
EGLEARGEA

SEQ ID NO: 1346 - protein, 8 aa, Artificial Sequence
  Artificial Peptide
EGREDSVF

SEQ ID NO: 1347 - protein, 9 aa, Artificial Sequence
  Artificial Peptide
EGREDSVFA

SEQ ID NO: 1348 - protein, 10 aa, Artificial Sequence
  Artificial Peptide
EGREDSVFAH

SEQ ID NO: 1349 - protein, 8 aa, Artificial Sequence
  Artificial Peptide
ELSMLEVF

SEQ ID NO: 1350 - protein, 11 aa, Artificial Sequence
  Artificial Peptide
ELSMLEVFEGR

SEQ ID NO: 1351 - protein, 9 aa, Artificial Sequence
  Artificial Peptide
ELVHFLLLK

SEQ ID NO: 1352 - protein, 10 aa, Artificial Sequence
  Artificial Peptide
ELVHFLLLKY

SEQ ID NO: 1353 - protein, 11 aa, Artificial Sequence
  Artificial Peptide
ELVHFLLLKYR

SEQ ID NO: 1354 - protein, 8 aa, Artificial Sequence
  Artificial Peptide
EMLESVLR

SEQ ID NO: 1355 - protein, 10 aa, Artificial Sequence
  Artificial Peptide
ESEFQAAISR

SEQ ID NO: 1356 - protein, 11 aa, Artificial Sequence
  Artificial Peptide
ESEFQAAISRK

SEQ ID NO: 1357 - protein, 10 aa, Artificial Sequence
  Artificial Peptide
ESVLRNCQDF

SEQ ID NO: 1358 - protein, 11 aa, Artificial Sequence
  Artificial Peptide
ESVLRNCQDFF

SEQ ID NO: 1359 - protein, 9 aa, Artificial Sequence
  Artificial Peptide
ETSYVKVLH

SEQ ID NO: 1360 - protein, 10 aa, Artificial Sequence
  Artificial Peptide
ETSYVKVLHH

SEQ ID NO: 1361 - protein, 11 aa, Artificial Sequence
  Artificial Peptide
EVFEGREDSVF

SEQ ID NO: 1362 - protein, 9 aa, Artificial Sequence
  Artificial Peptide
EVTLGEVPA

SEQ ID NO: 1363 - protein, 10 aa, Artificial Sequence
  Artificial Peptide
EVTLGEVPAA

SEQ ID NO: 1364 - protein, 10 aa, Artificial Sequence
  Artificial Peptide
EVVEVVPISH

SEQ ID NO: 1365 - protein, 9 aa, Artificial Sequence
  Artificial Peptide
EVVPISHLY

SEQ ID NO: 1366 - protein, 8 aa, Artificial Sequence
  Artificial Peptide
FFPVIFSK

SEQ ID NO: 1367 - protein, 9 aa, Artificial Sequence
  Artificial Peptide
FFPVIFSKA

SEQ ID NO: 1368 - protein, 8 aa, Artificial Sequence
  Artificial Peptide
FLLLKYRA

SEQ ID NO: 1369 - protein, 9 aa, Artificial Sequence
  Artificial Peptide
FLLLKYRAR

SEQ ID NO: 1370 - protein, 11 aa, Artificial Sequence
  Artificial Peptide
FSTTINYTLWR

SEQ ID NO: 1371 - protein, 11 aa, Artificial Sequence
  Artificial Peptide
GASSFSTTINY

SEQ ID NO: 1372 - protein, 8 aa, Artificial Sequence
  Artificial Peptide
GDCAPEEK

SEQ ID NO: 1373 - protein, 8 aa, Artificial Sequence
  Artificial Peptide
GDNQVMPK

SEQ ID NO: 1374 - protein, 8 aa, Artificial Sequence
  Artificial Peptide
GGEPHISY

SEQ ID NO: 1375 - protein, 8 aa, Artificial Sequence
  Artificial Peptide
GLEARGEA

SEQ ID NO: 1376 - protein, 11 aa, Artificial Sequence
  Artificial Peptide
GLLGDNQVMPK

SEQ ID NO: 1377 - protein, 8 aa, Artificial Sequence
  Artificial Peptide
GLLIIVLA

SEQ ID NO: 1378 - protein, 11 aa, Artificial Sequence
  Artificial Peptide
GLLIIVLAIIA

SEQ ID NO: 1379 - protein, 9 aa, Artificial Sequence
  Artificial Peptide
GLVGAQAPA

SEQ ID NO: 1380 - protein, 9 aa, Artificial Sequence
  Artificial Peptide
GSDPACYEF

SEQ ID NO: 1381 - protein, 11 aa, Artificial Sequence
  Artificial Peptide
GSSNQEEEGPR

SEQ ID NO: 1382 - protein, 10 aa, Artificial Sequence
  Artificial Peptide
HCKPEEGLEA

SEQ ID NO: 1383 - protein, 11 aa, Artificial Sequence
  Artificial Peptide
HCKPEEGLEAR

SEQ ID NO: 1384 - protein, 8 aa, Artificial Sequence
  Artificial Peptide
HFLLLKYR

SEQ ID NO: 1385 - protein, 9 aa, Artificial Sequence
  Artificial Peptide
HFLLLKYRA

SEQ ID NO: 1386 - protein, 10 aa, Artificial Sequence
  Artificial Peptide
HFLLLKYRAR

SEQ ID NO: 1387 - protein, 8 aa, Artificial Sequence
  Artificial Peptide
HISYPPLH

SEQ ID NO: 1388 - protein, 10 aa, Artificial Sequence
  Artificial Peptide
HISYPPLHER

SEQ ID NO: 1389 - protein, 11 aa, Artificial Sequence
  Artificial Peptide
HISYPPLHERA

SEQ ID NO: 1390 - protein, 9 aa, Artificial Sequence
  Artificial Peptide
HSPQGASSF

SEQ ID NO: 1391 - protein, 10 aa, Artificial Sequence
  Artificial Peptide
HTLKIGGEPH

SEQ ID NO: 1392 - protein, 8 aa, Artificial Sequence
  Artificial Peptide
IAIEGDCA

SEQ ID NO: 1393 - protein, 8 aa, Artificial Sequence
  Artificial Peptide
IFSKASEY

SEQ ID NO: 1394 - protein, 9 aa, Artificial Sequence
  Artificial Peptide
IGGEPHISY

SEQ ID NO: 1395 - protein, 9 aa, Artificial Sequence
  Artificial Peptide
IIAIEGDCA

SEQ ID NO: 1396 - protein, 8 aa, Artificial Sequence
  Artificial Peptide
IIVLAIIA

SEQ ID NO: 1397 - protein, 10 aa, Artificial Sequence
  Artificial Peptide
ILVTCLGLSY

SEQ ID NO: 1398 - protein, 10 aa, Artificial Sequence
  Artificial Peptide
ISRKMVELVH

SEQ ID NO: 1399 - protein, 11 aa, Artificial Sequence
  Artificial Peptide
ISRKMVELVHF

SEQ ID NO: 1400 - protein, 9 aa, Artificial Sequence
  Artificial Peptide
ISYPPLHER

SEQ ID NO: 1401 - protein, 10 aa, Artificial Sequence
  Artificial Peptide
ISYPPLHERA

SEQ ID NO: 1402 - protein, 10 aa, Artificial Sequence
  Artificial Peptide
KAEMLESVLR

SEQ ID NO: 1403 - protein, 10 aa, Artificial Sequence
  Artificial Peptide
KASEYLQLVF

SEQ ID NO: 1404 - protein, 10 aa, Artificial Sequence
  Artificial Peptide
KIGGEPHISY

SEQ ID NO: 1405 - protein, 8 aa, Artificial Sequence
  Artificial Peptide
KMVELVHF

SEQ ID NO: 1406 - protein, 10 aa, Artificial Sequence
  Artificial Peptide
KTGLLIIVLA

SEQ ID NO: 1407 - protein, 8 aa, Artificial Sequence
  Artificial Peptide
KVLHHTLK

SEQ ID NO: 1408 - protein, 11 aa, Artificial Sequence
  Artificial Peptide
LAIIAIEGDCA

SEQ ID NO: 1409 - protein, 9 aa, Artificial Sequence
  Artificial Peptide
LGDNQVMPK

SEQ ID NO: 1410 - protein, 8 aa, Artificial Sequence
  Artificial Peptide
LGLVGAQA

SEQ ID NO: 1411 - protein, 10 aa, Artificial Sequence
  Artificial Peptide
LGLVGAQAPA

SEQ ID NO: 1412 - protein, 8 aa, Artificial Sequence
  Artificial Peptide
LIETSYVK

SEQ ID NO: 1413 - protein, 11 aa, Artificial Sequence
  Artificial Peptide
LIETSYVKVLH

SEQ ID NO: 1414 - protein, 9 aa, Artificial Sequence
  Artificial Peptide
LIIVLAIIA

SEQ ID NO: 1415 - protein, 10 aa, Artificial Sequence
  Artificial Peptide
LLGDNQVMPK

SEQ ID NO: 1416 - protein, 10 aa, Artificial Sequence
  Artificial Peptide
LLIIVLAIIA

SEQ ID NO: 1417 - protein, 8 aa, Artificial Sequence
  Artificial Peptide
LLLKYRAR

SEQ ID NO: 1418 - protein, 11 aa, Artificial Sequence
  Artificial Peptide
LLMQDLVQENY

SEQ ID NO: 1419 - protein, 10 aa, Artificial Sequence
  Artificial Peptide
LMQDLVQENY

SEQ ID NO: 1420 - protein, 10 aa, Artificial Sequence
  Artificial Peptide
LSMLEVFEGR

SEQ ID NO: 1421 - protein, 11 aa, Artificial Sequence
  Artificial Peptide
LVEVTLGEVPA

SEQ ID NO: 1422 - protein, 8 aa, Artificial Sequence
  Artificial Peptide
LVGAQAPA

SEQ ID NO: 1423 - protein, 8 aa, Artificial Sequence
  Artificial Peptide
LVHFLLLK

SEQ ID NO: 1424 - protein, 9 aa, Artificial Sequence
  Artificial Peptide
LVHFLLLKY

SEQ ID NO: 1425 - protein, 10 aa, Artificial Sequence
  Artificial Peptide
LVHFLLLKYR

SEQ ID NO: 1426 - protein, 11 aa, Artificial Sequence
  Artificial Peptide
LVHFLLLKYRA

SEQ ID NO: 1427 - protein, 9 aa, Artificial Sequence
  Artificial Peptide
LVQENYLEY

SEQ ID NO: 1428 - protein, 10 aa, Artificial Sequence
  Artificial Peptide
LVQENYLEYR

SEQ ID NO: 1429 - protein, 9 aa, Artificial Sequence
  Artificial Peptide
LVTCLGLSY

SEQ ID NO: 1430 - protein, 9 aa, Artificial Sequence
  Artificial Peptide
MFPDLESEF

SEQ ID NO: 1431 - protein, 11 aa, Artificial Sequence
  Artificial Peptide
MFPDLESEFQA

SEQ ID NO: 1432 - protein, 8 aa, Artificial Sequence
  Artificial Peptide
MLEVFEGR

SEQ ID NO: 1433 - protein, 11 aa, Artificial Sequence
  Artificial Peptide
MVELVHFLLLK

SEQ ID NO: 1434 - protein, 10 aa, Artificial Sequence
  Artificial Peptide
NCQDFFPVIF

SEQ ID NO: 1435 - protein, 10 aa, Artificial Sequence
  Artificial Peptide
PAADSPSPPH

SEQ ID NO: 1436 - protein, 11 aa, Artificial Sequence
  Artificial Peptide
PACYEFLWGPR

SEQ ID NO: 1437 - protein, 9 aa, Artificial Sequence
  Artificial Peptide
PATEEQQTA

SEQ ID NO: 1438 - protein, 9 aa, Artificial Sequence
  Artificial Peptide
PDLESEFQA

SEQ ID NO: 1439 - protein, 10 aa, Artificial Sequence
  Artificial Peptide
PDLESEFQAA

SEQ ID NO: 1440 - protein, 8 aa, Artificial Sequence
  Artificial Peptide
PGSDPACY

SEQ ID NO: 1441 - protein, 10 aa, Artificial Sequence
  Artificial Peptide
PGSDPACYEF

SEQ ID NO: 1442 - protein, 8 aa, Artificial Sequence
  Artificial Peptide
PLEQRSQH

SEQ ID NO: 1443 - protein, 10 aa, Artificial Sequence
  Artificial Peptide
PLEQRSQHCK

SEQ ID NO: 1444 - protein, 8 aa, Artificial Sequence
  Artificial Peptide
PLHERALR

SEQ ID NO: 1445 - protein, 10 aa, Artificial Sequence
  Artificial Peptide
PSPPHSPQGA

SEQ ID NO: 1446 - protein, 10 aa, Artificial Sequence
  Artificial Peptide
PVIFSKASEY

SEQ ID NO: 1447 - protein, 11 aa, Artificial Sequence
  Artificial Peptide
QAPATEEQQTA

SEQ ID NO: 1448 - protein, 8 aa, Artificial Sequence
  Artificial Peptide
QDFFPVIF

SEQ ID NO: 1449 - protein, 10 aa, Artificial Sequence
  Artificial Peptide
QDFFPVIFSK

SEQ ID NO: 1450 - protein, 11 aa, Artificial Sequence
  Artificial Peptide
QDFFPVIFSKA

SEQ ID NO: 1451 - protein, 8 aa, Artificial Sequence
  Artificial Peptide
QDLVQENY

SEQ ID NO: 1452 - protein, 11 aa, Artificial Sequence
  Artificial Peptide
QDLVQENYLEY

SEQ ID NO: 1453 - protein, 8 aa, Artificial Sequence
  Artificial Peptide
QVPGSDPA

SEQ ID NO: 1454 - protein, 10 aa, Artificial Sequence
  Artificial Peptide
QVPGSDPACY

SEQ ID NO: 1455 - protein, 8 aa, Artificial Sequence
  Artificial Peptide
RALIETSY

SEQ ID NO: 1456 - protein, 10 aa, Artificial Sequence
  Artificial Peptide
RALIETSYVK

SEQ ID NO: 1457 - protein, 8 aa, Artificial Sequence
  Artificial Peptide
RAREPVTK

SEQ ID NO: 1458 - protein, 9 aa, Artificial Sequence
  Artificial Peptide
RAREPVTKA

SEQ ID NO: 1459 - protein, 10 aa, Artificial Sequence
  Artificial Peptide
RGEALGLVGA

SEQ ID NO: 1460 - protein, 10 aa, Artificial Sequence
  Artificial Peptide
RMFPDLESEF

SEQ ID NO: 1461 - protein, 8 aa, Artificial Sequence
  Artificial Peptide
SDPACYEF

SEQ ID NO: 1462 - protein, 8 aa, Artificial Sequence
  Artificial Peptide
SFSTTINY

SEQ ID NO: 1463 - protein, 9 aa, Artificial Sequence
  Artificial Peptide
SMLEVFEGR

SEQ ID NO: 1464 - protein, 9 aa, Artificial Sequence
  Artificial Peptide
SSFSTTINY

SEQ ID NO: 1465 - protein, 10 aa, Artificial Sequence
  Artificial Peptide
SSNQEEEGPR

SEQ ID NO: 1466 - protein, 10 aa, Artificial Sequence
  Artificial Peptide
STTINYTLWR

SEQ ID NO: 1467 - protein, 8 aa, Artificial Sequence
  Artificial Peptide
SVFAHPRK

SEQ ID NO: 1468 - protein, 9 aa, Artificial Sequence
  Artificial Peptide
SVLRNCQDF

SEQ ID NO: 1469 - protein, 10 aa, Artificial Sequence
  Artificial Peptide
SVLRNCQDFF

SEQ ID NO: 1470 - protein, 9 aa, Artificial Sequence
  Artificial Peptide
TGLLIIVLA

SEQ ID NO: 1471 - protein, 8 aa, Artificial Sequence
  Artificial Peptide
TINYTLWR

SEQ ID NO: 1472 - protein, 8 aa, Artificial Sequence
  Artificial Peptide
TLGEVPAA

SEQ ID NO: 1473 - protein, 9 aa, Artificial Sequence
  Artificial Peptide
TLKIGGEPH

SEQ ID NO: 1474 - protein, 8 aa, Artificial Sequence
  Artificial Peptide
TSYVKVLH

SEQ ID NO: 1475 - protein, 9 aa, Artificial Sequence
  Artificial Peptide
TSYVKVLHH

SEQ ID NO: 1476 - protein, 9 aa, Artificial Sequence
  Artificial Peptide
TTINYTLWR

SEQ ID NO: 1477 - protein, 10 aa, Artificial Sequence
  Artificial Peptide
VFEGREDSVF

SEQ ID NO: 1478 - protein, 11 aa, Artificial Sequence
  Artificial Peptide
VFEGREDSVFA

SEQ ID NO: 1479 - protein, 9 aa, Artificial Sequence
  Artificial Peptide
VIFSKASEY

SEQ ID NO: 1480 - protein, 8 aa, Artificial Sequence
  Artificial Peptide
VLRNCQDF

SEQ ID NO: 1481 - protein, 9 aa, Artificial Sequence
  Artificial Peptide
VLRNCQDFF

SEQ ID NO: 1482 - protein, 8 aa, Artificial Sequence
  Artificial Peptide
VTCLGLSY

SEQ ID NO: 1483 - protein, 8 aa, Artificial Sequence
  Artificial Peptide
VTLGEVPA

SEQ ID NO: 1484 - protein, 9 aa, Artificial Sequence
  Artificial Peptide
VTLGEVPAA

SEQ ID NO: 1485 - protein, 9 aa, Artificial Sequence
  Artificial Peptide
VVEVVPISH

SEQ ID NO: 1486 - protein, 11 aa, Artificial Sequence
  Artificial Peptide
VVEVVPISHLY

SEQ ID NO: 1487 - protein, 8 aa, Artificial Sequence
  Artificial Peptide
VVPISHLY

SEQ ID NO: 1488 - protein, 11 aa, Artificial Sequence
  Artificial Peptide
WGPRALIETSY

SEQ ID NO: 1489 - protein, 11 aa, Artificial Sequence
  Artificial Peptide
YILVTCLGLSY

SEQ ID NO: 1490 - protein, 10 aa, Artificial Sequence
  Artificial Peptide
YVKVLHHTLK

SEQ ID NO: 1491 - protein, 8 aa, Artificial Sequence
  Artificial Peptide
AALSRKVA

SEQ ID NO: 1492 - protein, 10 aa, Artificial Sequence
  Artificial Peptide
ACYEFLWGPR

SEQ ID NO: 1493 - protein, 11 aa, Artificial Sequence
  Artificial Peptide
ACYEFLWGPRA

SEQ ID NO: 1494 - protein, 9 aa, Artificial Sequence
  Artificial Peptide
AGLLIIVLA

SEQ ID NO: 1495 - protein, 10 aa, Artificial Sequence
  Artificial Peptide
AIIAREGDCA

SEQ ID NO: 1496 - protein, 9 aa, Artificial Sequence
  Artificial Peptide
ALGLVGAQA

SEQ ID NO: 1497 - protein, 11 aa, Artificial Sequence
  Artificial Peptide
ALGLVGAQAPA

SEQ ID NO: 1498 - protein, 11 aa, Artificial Sequence
  Artificial Peptide
ALSRKVAELVH

SEQ ID NO: 1499 - protein, 9 aa, Artificial Sequence
  Artificial Peptide
ALVETSYVK

SEQ ID NO: 1500 - protein, 10 aa, Artificial Sequence
  Artificial Peptide
ASSLPTTMNY

SEQ ID NO: 1501 - protein, 9 aa, Artificial Sequence
  Artificial Peptide
ASSSLQLVF

SEQ ID NO: 1502 - protein, 8 aa, Artificial Sequence
  Artificial Peptide
ATCLGLSY

SEQ ID NO: 1503 - protein, 8 aa, Artificial Sequence
  Artificial Peptide
ATEEQEAA

SEQ ID NO: 1504 - protein, 8 aa, Artificial Sequence
  Artificial Peptide
DLESEFQA

SEQ ID NO: 1505 - protein, 9 aa, Artificial Sequence
  Artificial Peptide
DLESEFQAA

SEQ ID NO: 1506 - protein, 8 aa, Artificial Sequence
  Artificial Peptide
DSILGDPK

SEQ ID NO: 1507 - protein, 9 aa, Artificial Sequence
  Artificial Peptide
DSILGDPKK

SEQ ID NO: 1508 - protein, 8 aa, Artificial Sequence
  Artificial Peptide
EALGLVGA

SEQ ID NO: 1509 - protein, 10 aa, Artificial Sequence
  Artificial Peptide
EALGLVGAQA

SEQ ID NO: 1510 - protein, 9 aa, Artificial Sequence
  Artificial Peptide
EDSILGDPK

SEQ ID NO: 1511 - protein, 10 aa, Artificial Sequence
  Artificial Peptide
EDSILGDPKK

SEQ ID NO: 1512 - protein, 8 aa, Artificial Sequence
  Artificial Peptide
EFLWGPRA

SEQ ID NO: 1513 - protein, 8 aa, Artificial Sequence
  Artificial Peptide
EFQAALSR

SEQ ID NO: 1514 - protein, 9 aa, Artificial Sequence
  Artificial Peptide
EFQAALSRK

SEQ ID NO: 1515 - protein, 11 aa, Artificial Sequence
  Artificial Peptide
EFQAALSRKVA

SEQ ID NO: 1516 - protein, 9 aa, Artificial Sequence
  Artificial Peptide
EGDCAPEEK

SEQ ID NO: 1517 - protein, 9 aa, Artificial Sequence
  Artificial Peptide
EGLEARGEA

SEQ ID NO: 1518 - protein, 10 aa, Artificial Sequence
  Artificial Peptide
ELMEVDPIGH

SEQ ID NO: 1519 - protein, 8 aa, Artificial Sequence
  Artificial Peptide
ELSVLEVF

SEQ ID NO: 1520 - protein, 11 aa, Artificial Sequence
  Artificial Peptide
ELSVLEVFEGR

SEQ ID NO: 1521 - protein, 9 aa, Artificial Sequence
  Artificial Peptide
ELVHFLLLK

SEQ ID NO: 1522 - protein, 10 aa, Artificial Sequence
  Artificial Peptide
ELVHFLLLKY

SEQ ID NO: 1523 - protein, 11 aa, Artificial Sequence
  Artificial Peptide
ELVHFLLLKYR

SEQ ID NO: 1524 - protein, 10 aa, Artificial Sequence
  Artificial Peptide
ESEFQAALSR

SEQ ID NO: 1525 - protein, 11 aa, Artificial Sequence
  Artificial Peptide
ESEFQAALSRK

SEQ ID NO: 1526 - protein, 9 aa, Artificial Sequence
  Artificial Peptide
ETSYVKVLH

SEQ ID NO: 1527 - protein, 10 aa, Artificial Sequence
  Artificial Peptide
ETSYVKVLHH

SEQ ID NO: 1528 - protein, 9 aa, Artificial Sequence
  Artificial Peptide
EVDPIGHLY

SEQ ID NO: 1529 - protein, 11 aa, Artificial Sequence
  Artificial Peptide
EVDPIGHLYIF

SEQ ID NO: 1530 - protein, 9 aa, Artificial Sequence
  Artificial Peptide
EVTLGEVPA

SEQ ID NO: 1531 - protein, 10 aa, Artificial Sequence
  Artificial Peptide
EVTLGEVPAA

SEQ ID NO: 1532 - protein, 9 aa, Artificial Sequence
  Artificial Peptide
FATCLGLSY

SEQ ID NO: 1533 - protein, 8 aa, Artificial Sequence
  Artificial Peptide
FFPVIFSK

SEQ ID NO: 1534 - protein, 9 aa, Artificial Sequence
  Artificial Peptide
FFPVIFSKA

SEQ ID NO: 1535 - protein, 8 aa, Artificial Sequence
  Artificial Peptide
FLLLKYRA

SEQ ID NO: 1536 - protein, 9 aa, Artificial Sequence
  Artificial Peptide
FLLLKYRAR

SEQ ID NO: 1537 - protein, 9 aa, Artificial Sequence
  Artificial Peptide
FVQENYLEY

SEQ ID NO: 1538 - protein, 10 aa, Artificial Sequence
  Artificial Peptide
FVQENYLEYR

SEQ ID NO: 1539 - protein, 11 aa, Artificial Sequence
  Artificial Peptide
GASSLPTTMNY

SEQ ID NO: 1540 - protein, 8 aa, Artificial Sequence
  Artificial Peptide
GDCAPEEK

SEQ ID NO: 1541 - protein, 8 aa, Artificial Sequence
  Artificial Peptide
GDNQIMPK

SEQ ID NO: 1542 - protein, 9 aa, Artificial Sequence
  Artificial Peptide
GDNQIMPKA

SEQ ID NO: 1543 - protein, 10 aa, Artificial Sequence
  Artificial Peptide
GDPKKLLTQH

SEQ ID NO: 1544 - protein, 11 aa, Artificial Sequence
  Artificial Peptide
GDPKKLLTQHF

SEQ ID NO: 1545 - protein, 11 aa, Artificial Sequence
  Artificial Peptide
GGPHISYPPLH

SEQ ID NO: 1546 - protein, 8 aa, Artificial Sequence
  Artificial Peptide
GLEARGEA

SEQ ID NO: 1547 - protein, 11 aa, Artificial Sequence
  Artificial Peptide
GLLGDNQIMPK

SEQ ID NO: 1548 - protein, 8 aa, Artificial Sequence
  Artificial Peptide
GLLIIVLA

SEQ ID NO: 1549 - protein, 11 aa, Artificial Sequence
  Artificial Peptide
GLLIIVLAIIA

SEQ ID NO: 1550 - protein, 9 aa, Artificial Sequence
  Artificial Peptide
GLVGAQAPA

SEQ ID NO: 1551 - protein, 9 aa, Artificial Sequence
  Artificial Peptide
GSDPACYEF

SEQ ID NO: 1552 - protein, 9 aa, Artificial Sequence
  Artificial Peptide
GSVVGNWQY

SEQ ID NO: 1553 - protein, 10 aa, Artificial Sequence
  Artificial Peptide
GSVVGNWQYF

SEQ ID NO: 1554 - protein, 11 aa, Artificial Sequence
  Artificial Peptide
GSVVGNWQYFF

SEQ ID NO: 1555 - protein, 10 aa, Artificial Sequence
  Artificial Peptide
HCKPEEGLEA

SEQ ID NO: 1556 - protein, 11 aa, Artificial Sequence
  Artificial Peptide
HCKPEEGLEAR

SEQ ID NO: 1557 - protein, 8 aa, Artificial Sequence
  Artificial Peptide
HFLLLKYR

SEQ ID NO: 1558 - protein, 9 aa, Artificial Sequence
  Artificial Peptide
HFLLLKYRA

SEQ ID NO: 1559 - protein, 10 aa, Artificial Sequence
  Artificial Peptide
HFLLLKYRAR

SEQ ID NO: 1560 - protein, 10 aa, Artificial Sequence
  Artificial Peptide
HFVQENYLEY

SEQ ID NO: 1561 - protein, 11 aa, Artificial Sequence
  Artificial Peptide
HFVQENYLEYR

SEQ ID NO: 1562 - protein, 8 aa, Artificial Sequence
  Artificial Peptide
HISYPPLH

SEQ ID NO: 1563 - protein, 10 aa, Artificial Sequence
  Artificial Peptide
HMVKISGGPH

SEQ ID NO: 1564 - protein, 8 aa, Artificial Sequence
  Artificial Peptide
IAREGDCA

SEQ ID NO: 1565 - protein, 10 aa, Artificial Sequence
  Artificial Peptide
IFATCLGLSY

SEQ ID NO: 1566 - protein, 8 aa, Artificial Sequence
  Artificial Peptide
IGHLYIFA

SEQ ID NO: 1567 - protein, 9 aa, Artificial Sequence
  Artificial Peptide
IIAREGDCA

SEQ ID NO: 1568 - protein, 8 aa, Artificial Sequence
  Artificial Peptide
IIVLAIIA

SEQ ID NO: 1569 - protein, 9 aa, Artificial Sequence
  Artificial Peptide
IIVLAIIAR

SEQ ID NO: 1570 - protein, 9 aa, Artificial Sequence
  Artificial Peptide
ISGGPHISY

SEQ ID NO: 1571 - protein, 8 aa, Artificial Sequence
  Artificial Peptide
IVLAIIAR

SEQ ID NO: 1572 - protein, 10 aa, Artificial Sequence
  Artificial Peptide
KAGLLIIVLA

SEQ ID NO: 1573 - protein, 10 aa, Artificial Sequence
  Artificial Peptide
KASSSLQLVF

SEQ ID NO: 1574 - protein, 10 aa, Artificial Sequence
  Artificial Peptide
KISGGPHISY

SEQ ID NO: 1575 - protein, 8 aa, Artificial Sequence
  Artificial Peptide
KVAELVHF

SEQ ID NO: 1576 - protein, 8 aa, Artificial Sequence
  Artificial Peptide
KVLHHMVK

SEQ ID NO: 1577 - protein, 11 aa, Artificial Sequence
  Artificial Peptide
LAIIAREGDCA

SEQ ID NO: 1578 - protein, 9 aa, Artificial Sequence
  Artificial Peptide
LGDNQIMPK

SEQ ID NO: 1579 - protein, 10 aa, Artificial Sequence
  Artificial Peptide
LGDNQIMPKA

SEQ ID NO: 1580 - protein, 11 aa, Artificial Sequence
  Artificial Peptide
LGDPKKLLTQH

SEQ ID NO: 1581 - protein, 8 aa, Artificial Sequence
  Artificial Peptide
LGLVGAQA

SEQ ID NO: 1582 - protein, 10 aa, Artificial Sequence
  Artificial Peptide
LGLVGAQAPA

SEQ ID NO: 1583 - protein, 10 aa, Artificial Sequence
  Artificial Peptide
LGSVVGNWQY

SEQ ID NO: 1584 - protein, 11 aa, Artificial Sequence
  Artificial Peptide
LGSVVGNWQYF

SEQ ID NO: 1585 - protein, 9 aa, Artificial Sequence
  Artificial Peptide
LIIVLAIIA

SEQ ID NO: 1586 - protein, 10 aa, Artificial Sequence
  Artificial Peptide
LIIVLAIIAR

SEQ ID NO: 1587 - protein, 10 aa, Artificial Sequence
  Artificial Peptide
LLGDNQIMPK

SEQ ID NO: 1588 - protein, 11 aa, Artificial Sequence
  Artificial Peptide
LLGDNQIMPKA

SEQ ID NO: 1589 - protein, 10 aa, Artificial Sequence
  Artificial Peptide
LLIIVLAIIA

SEQ ID NO: 1590 - protein, 11 aa, Artificial Sequence
  Artificial Peptide
LLIIVLAIIAR

SEQ ID NO: 1591 - protein, 8 aa, Artificial Sequence
  Artificial Peptide
LLLKYRAR

SEQ ID NO: 1592 - protein, 11 aa, Artificial Sequence
  Artificial Peptide
LLTQHFVQENY

SEQ ID NO: 1593 - protein, 9 aa, Artificial Sequence
  Artificial Peptide
LMEVDPIGH

SEQ ID NO: 1594 - protein, 11 aa, Artificial Sequence
  Artificial Peptide
LMEVDPIGHLY

SEQ ID NO: 1595 - protein, 10 aa, Artificial Sequence
  Artificial Peptide
LSRKVAELVH

SEQ ID NO: 1596 - protein, 11 aa, Artificial Sequence
  Artificial Peptide
LSRKVAELVHF

SEQ ID NO: 1597 - protein, 10 aa, Artificial Sequence
  Artificial Peptide
LSVLEVFEGR

SEQ ID NO: 1598 - protein, 10 aa, Artificial Sequence
  Artificial Peptide
LTQHFVQENY

SEQ ID NO: 1599 - protein, 8 aa, Artificial Sequence
  Artificial Peptide
LVETSYVK

SEQ ID NO: 1600 - protein, 11 aa, Artificial Sequence
  Artificial Peptide
LVETSYVKVLH

SEQ ID NO: 1601 - protein, 11 aa, Artificial Sequence
  Artificial Peptide
LVEVTLGEVPA

SEQ ID NO: 1602 - protein, 8 aa, Artificial Sequence
  Artificial Peptide
LVGAQAPA

SEQ ID NO: 1603 - protein, 8 aa, Artificial Sequence
  Artificial Peptide
LVHFLLLK

SEQ ID NO: 1604 - protein, 9 aa, Artificial Sequence
  Artificial Peptide
LVHFLLLKY

SEQ ID NO: 1605 - protein, 10 aa, Artificial Sequence
  Artificial Peptide
LVHFLLLKYR

SEQ ID NO: 1606 - protein, 11 aa, Artificial Sequence
  Artificial Peptide
LVHFLLLKYRA

SEQ ID NO: 1607 - protein, 11 aa, Artificial Sequence
  Artificial Peptide
MLGSVVGNWQY

SEQ ID NO: 1608 - protein, 9 aa, Artificial Sequence
  Artificial Peptide
MVKISGGPH

SEQ ID NO: 1609 - protein, 11 aa, Artificial Sequence
  Artificial Peptide
PACYEFLWGPR

SEQ ID NO: 1610 - protein, 8 aa, Artificial Sequence
  Artificial Peptide
PATEEQEA

SEQ ID NO: 1611 - protein, 9 aa, Artificial Sequence
  Artificial Peptide
PATEEQEAA

SEQ ID NO: 1612 - protein, 9 aa, Artificial Sequence
  Artificial Peptide
PDLESEFQA

SEQ ID NO: 1613 - protein, 10 aa, Artificial Sequence
  Artificial Peptide
PDLESEFQAA

SEQ ID NO: 1614 - protein, 10 aa, Artificial Sequence
  Artificial Peptide
PDPPQSPQGA

SEQ ID NO: 1615 - protein, 8 aa, Artificial Sequence
  Artificial Peptide
PGSDPACY

SEQ ID NO: 1616 - protein, 10 aa, Artificial Sequence
  Artificial Peptide
PGSDPACYEF

SEQ ID NO: 1617 - protein, 8 aa, Artificial Sequence
  Artificial Peptide
PIGHLYIF

SEQ ID NO: 1618 - protein, 9 aa, Artificial Sequence
  Artificial Peptide
PIGHLYIFA

SEQ ID NO: 1619 - protein, 8 aa, Artificial Sequence
  Artificial Peptide
PLEQRSQH

SEQ ID NO: 1620 - protein, 10 aa, Artificial Sequence
  Artificial Peptide
PLEQRSQHCK

SEQ ID NO: 1621 - protein, 8 aa, Artificial Sequence
  Artificial Peptide
PLHEWVLR

SEQ ID NO: 1622 - protein, 11 aa, Artificial Sequence
  Artificial Peptide
PSTFPDLESEF

SEQ ID NO: 1623 - protein, 9 aa, Artificial Sequence
  Artificial Peptide
QAALSRKVA

SEQ ID NO: 1624 - protein, 10 aa, Artificial Sequence
  Artificial Peptide
QAPATEEQEA

SEQ ID NO: 1625 - protein, 11 aa, Artificial Sequence
  Artificial Peptide
QAPATEEQEAA

SEQ ID NO: 1626 - protein, 8 aa, Artificial Sequence
  Artificial Peptide
QVPGSDPA

SEQ ID NO: 1627 - protein, 10 aa, Artificial Sequence
  Artificial Peptide
QVPGSDPACY

SEQ ID NO: 1628 - protein, 8 aa, Artificial Sequence
  Artificial Peptide
RALVETSY

SEQ ID NO: 1629 - protein, 10 aa, Artificial Sequence
  Artificial Peptide
RALVETSYVK

SEQ ID NO: 1630 - protein, 8 aa, Artificial Sequence
  Artificial Peptide
RAREPVTK

SEQ ID NO: 1631 - protein, 9 aa, Artificial Sequence
  Artificial Peptide
RAREPVTKA

SEQ ID NO: 1632 - protein, 10 aa, Artificial Sequence
  Artificial Peptide
RGEALGLVGA

SEQ ID NO: 1633 - protein, 8 aa, Artificial Sequence
  Artificial Peptide
SDPACYEF

SEQ ID NO: 1634 - protein, 8 aa, Artificial Sequence
  Artificial Peptide
SGGPHISY

SEQ ID NO: 1635 - protein, 8 aa, Artificial Sequence
  Artificial Peptide
SILGDPKK

SEQ ID NO: 1636 - protein, 8 aa, Artificial Sequence
  Artificial Peptide
SLPTTMNY

SEQ ID NO: 1637 - protein, 9 aa, Artificial Sequence
  Artificial Peptide
SSLPTTMNY

SEQ ID NO: 1638 - protein, 8 aa, Artificial Sequence
  Artificial Peptide
SSSLQLVF

SEQ ID NO: 1639 - protein, 10 aa, Artificial Sequence
  Artificial Peptide
STFPDLESEF

SEQ ID NO: 1640 - protein, 9 aa, Artificial Sequence
  Artificial Peptide
SVLEVFEGR

SEQ ID NO: 1641 - protein, 8 aa, Artificial Sequence
  Artificial Peptide
SVVGNWQY

SEQ ID NO: 1642 - protein, 9 aa, Artificial Sequence
  Artificial Peptide
SVVGNWQYF

SEQ ID NO: 1643 - protein, 10 aa, Artificial Sequence
  Artificial Peptide
SVVGNWQYFF

SEQ ID NO: 1644 - protein, 9 aa, Artificial Sequence
  Artificial Peptide
TFPDLESEF

SEQ ID NO: 1645 - protein, 11 aa, Artificial Sequence
  Artificial Peptide
TFPDLESEFQA

SEQ ID NO: 1646 - protein, 8 aa, Artificial Sequence
  Artificial Peptide
TLGEVPAA

SEQ ID NO: 1647 - protein, 11 aa, Artificial Sequence
  Artificial Peptide
TMNYPLWSQSY

SEQ ID NO: 1648 - protein, 8 aa, Artificial Sequence
  Artificial Peptide
TSYVKVLH

SEQ ID NO: 1649 - protein, 9 aa, Artificial Sequence
  Artificial Peptide
TSYVKVLHH

SEQ ID NO: 1650 - protein, 11 aa, Artificial Sequence
  Artificial Peptide
VAELVHFLLLK

SEQ ID NO: 1651 - protein, 8 aa, Artificial Sequence
  Artificial Peptide
VDPIGHLY

SEQ ID NO: 1652 - protein, 10 aa, Artificial Sequence
  Artificial Peptide
VDPIGHLYIF

SEQ ID NO: 1653 - protein, 11 aa, Artificial Sequence
  Artificial Peptide
VDPIGHLYIFA

SEQ ID NO: 1654 - protein, 8 aa, Artificial Sequence
  Artificial Peptide
VGNWQYFF

SEQ ID NO: 1655 - protein, 8 aa, Artificial Sequence
  Artificial Peptide
VLEVFEGR

SEQ ID NO: 1656 - protein, 8 aa, Artificial Sequence
  Artificial Peptide
VTLGEVPA

SEQ ID NO: 1657 - protein, 9 aa, Artificial Sequence
  Artificial Peptide
VTLGEVPAA

SEQ ID NO: 1658 - protein, 8 aa, Artificial Sequence
  Artificial Peptide
VVGNWQYF

SEQ ID NO: 1659 - protein, 9 aa, Artificial Sequence
  Artificial Peptide
VVGNWQYFF

SEQ ID NO: 1660 - protein, 11 aa, Artificial Sequence
  Artificial Peptide
WGPRALVETSY

SEQ ID NO: 1661 - protein, 9 aa, Artificial Sequence
  Artificial Peptide
YFFPVIFSK

SEQ ID NO: 1662 - protein, 10 aa, Artificial Sequence
  Artificial Peptide
YFFPVIFSKA

SEQ ID NO: 1663 - protein, 11 aa, Artificial Sequence
  Artificial Peptide
YIFATCLGLSY

SEQ ID NO: 1664 - protein, 10 aa, Artificial Sequence
  Artificial Peptide
YVKVLHHMVK

SEQ ID NO: 1665 - protein, 9 aa, Artificial Sequence
  Artificial Peptide
AADSPSPPH

SEQ ID NO: 1666 - protein, 10 aa, Artificial Sequence
  Artificial Peptide
ACYEFLWGPR

SEQ ID NO: 1667 - protein, 8 aa, Artificial Sequence
  Artificial Peptide
ADSPSPPH

SEQ ID NO: 1668 - protein, 11 aa, Artificial Sequence
  Artificial Peptide
AIEGDCAPEEK

SEQ ID NO: 1669 - protein, 11 aa, Artificial Sequence
  Artificial Peptide
AISRKMVELVH

SEQ ID NO: 1670 - protein, 9 aa, Artificial Sequence
  Artificial Peptide
ALIETSYVK

SEQ ID NO: 1671 - protein, 10 aa, Artificial Sequence
  Artificial Peptide
ASSFSTTINY

SEQ ID NO: 1672 - protein, 9 aa, Artificial Sequence
  Artificial Peptide
DFFPVIFSK

SEQ ID NO: 1673 - protein, 10 aa, Artificial Sequence
  Artificial Peptide
DLVQENYLEY

SEQ ID NO: 1674 - protein, 11 aa, Artificial Sequence
  Artificial Peptide
DLVQENYLEYR

SEQ ID NO: 1675 - protein, 8 aa, Artificial Sequence
  Artificial Peptide
DSVFAHPR

SEQ ID NO: 1676 - protein, 9 aa, Artificial Sequence
  Artificial Peptide
DSVFAHPRK

SEQ ID NO: 1677 - protein, 9 aa, Artificial Sequence
  Artificial Peptide
EDSVFAHPR

SEQ ID NO: 1678 - protein, 10 aa, Artificial Sequence
  Artificial Peptide
EDSVFAHPRK

SEQ ID NO: 1679 - protein, 8 aa, Artificial Sequence
  Artificial Peptide
EFQAAISR

SEQ ID NO: 1680 - protein, 9 aa, Artificial Sequence
  Artificial Peptide
EFQAAISRK

SEQ ID NO: 1681 - protein, 9 aa, Artificial Sequence
  Artificial Peptide
EGDCAPEEK

SEQ ID NO: 1682 - protein, 10 aa, Artificial Sequence
  Artificial Peptide
EGREDSVFAH

SEQ ID NO: 1683 - protein, 11 aa, Artificial Sequence
  Artificial Peptide
ELSMLEVFEGR

SEQ ID NO: 1684 - protein, 9 aa, Artificial Sequence
  Artificial Peptide
ELVHFLLLK

SEQ ID NO: 1685 - protein, 10 aa, Artificial Sequence
  Artificial Peptide
ELVHFLLLKY

SEQ ID NO: 1686 - protein, 11 aa, Artificial Sequence
  Artificial Peptide
ELVHFLLLKYR

SEQ ID NO: 1687 - protein, 8 aa, Artificial Sequence
  Artificial Peptide
EMLESVLR

SEQ ID NO: 1688 - protein, 10 aa, Artificial Sequence
  Artificial Peptide
ESEFQAAISR

SEQ ID NO: 1689 - protein, 11 aa, Artificial Sequence
  Artificial Peptide
ESEFQAAISRK

SEQ ID NO: 1690 - protein, 9 aa, Artificial Sequence
  Artificial Peptide
ETSYVKVLH

SEQ ID NO: 1691 - protein, 10 aa, Artificial Sequence
  Artificial Peptide
ETSYVKVLHH

SEQ ID NO: 1692 - protein, 10 aa, Artificial Sequence
  Artificial Peptide
EVVEVVPISH

SEQ ID NO: 1693 - protein, 9 aa, Artificial Sequence
  Artificial Peptide
EVVPISHLY

SEQ ID NO: 1694 - protein, 8 aa, Artificial Sequence
  Artificial Peptide
FFPVIFSK

SEQ ID NO: 1695 - protein, 9 aa, Artificial Sequence
  Artificial Peptide
FLLLKYRAR

SEQ ID NO: 1696 - protein, 11 aa, Artificial Sequence
  Artificial Peptide
FSTTINYTLWR

SEQ ID NO: 1697 - protein, 11 aa, Artificial Sequence
  Artificial Peptide
GASSFSTTINY

SEQ ID NO: 1698 - protein, 8 aa, Artificial Sequence
  Artificial Peptide
GDCAPEEK

SEQ ID NO: 1699 - protein, 8 aa, Artificial Sequence
  Artificial Peptide
GDNQVMPK

SEQ ID NO: 1700 - protein, 8 aa, Artificial Sequence
  Artificial Peptide
GGEPHISY

SEQ ID NO: 1701 - protein, 11 aa, Artificial Sequence
  Artificial Peptide
GLLGDNQVMPK

SEQ ID NO: 1702 - protein, 11 aa, Artificial Sequence
  Artificial Peptide
GSSNQEEEGPR

SEQ ID NO: 1703 - protein, 11 aa, Artificial Sequence
  Artificial Peptide
HCKPEEGLEAR

SEQ ID NO: 1704 - protein, 8 aa, Artificial Sequence
  Artificial Peptide
HFLLLKYR

SEQ ID NO: 1705 - protein, 10 aa, Artificial Sequence
  Artificial Peptide
HFLLLKYRAR

SEQ ID NO: 1706 - protein, 8 aa, Artificial Sequence
  Artificial Peptide
HISYPPLH

SEQ ID NO: 1707 - protein, 10 aa, Artificial Sequence
  Artificial Peptide
HISYPPLHER

SEQ ID NO: 1708 - protein, 10 aa, Artificial Sequence
  Artificial Peptide
HTLKIGGEPH

SEQ ID NO: 1709 - protein, 8 aa, Artificial Sequence
  Artificial Peptide
IFSKASEY

SEQ ID NO: 1710 - protein, 9 aa, Artificial Sequence
  Artificial Peptide
IGGEPHISY

SEQ ID NO: 1711 - protein, 10 aa, Artificial Sequence
  Artificial Peptide
ILVTCLGLSY

SEQ ID NO: 1712 - protein, 10 aa, Artificial Sequence
  Artificial Peptide
ISRKMVELVH

SEQ ID NO: 1713 - protein, 9 aa, Artificial Sequence
  Artificial Peptide
ISYPPLHER

SEQ ID NO: 1714 - protein, 10 aa, Artificial Sequence
  Artificial Peptide
KAEMLESVLR

SEQ ID NO: 1715 - protein, 10 aa, Artificial Sequence
  Artificial Peptide
KIGGEPHISY

SEQ ID NO: 1716 - protein, 8 aa, Artificial Sequence
  Artificial Peptide
KVLHHTLK

SEQ ID NO: 1717 - protein, 9 aa, Artificial Sequence
  Artificial Peptide
LGDNQVMPK

SEQ ID NO: 1718 - protein, 8 aa, Artificial Sequence
  Artificial Peptide
LIETSYVK

SEQ ID NO: 1719 - protein, 11 aa, Artificial Sequence
  Artificial Peptide
LIETSYVKVLH

SEQ ID NO: 1720 - protein, 10 aa, Artificial Sequence
  Artificial Peptide
LLGDNQVMPK

SEQ ID NO: 1721 - protein, 8 aa, Artificial Sequence
  Artificial Peptide
LLLKYRAR

SEQ ID NO: 1722 - protein, 11 aa, Artificial Sequence
  Artificial Peptide
LLMQDLVQENY

SEQ ID NO: 1723 - protein, 10 aa, Artificial Sequence
  Artificial Peptide
LMQDLVQENY

SEQ ID NO: 1724 - protein, 10 aa, Artificial Sequence
  Artificial Peptide
LSMLEVFEGR

SEQ ID NO: 1725 - protein, 8 aa, Artificial Sequence
  Artificial Peptide
LVHFLLLK

SEQ ID NO: 1726 - protein, 9 aa, Artificial Sequence
  Artificial Peptide
LVHFLLLKY

SEQ ID NO: 1727 - protein, 10 aa, Artificial Sequence
  Artificial Peptide
LVHFLLLKYR

SEQ ID NO: 1728 - protein, 9 aa, Artificial Sequence
  Artificial Peptide
LVQENYLEY

SEQ ID NO: 1729 - protein, 10 aa, Artificial Sequence
  Artificial Peptide
LVQENYLEYR

SEQ ID NO: 1730 - protein, 9 aa, Artificial Sequence
  Artificial Peptide
LVTCLGLSY

SEQ ID NO: 1731 - protein, 8 aa, Artificial Sequence
  Artificial Peptide
MLEVFEGR

SEQ ID NO: 1732 - protein, 11 aa, Artificial Sequence
  Artificial Peptide
MVELVHFLLLK

SEQ ID NO: 1733 - protein, 10 aa, Artificial Sequence
  Artificial Peptide
PAADSPSPPH

SEQ ID NO: 1734 - protein, 11 aa, Artificial Sequence
  Artificial Peptide
PACYEFLWGPR

SEQ ID NO: 1735 - protein, 8 aa, Artificial Sequence
  Artificial Peptide
PGSDPACY

SEQ ID NO: 1736 - protein, 8 aa, Artificial Sequence
  Artificial Peptide
PLEQRSQH

SEQ ID NO: 1737 - protein, 10 aa, Artificial Sequence
  Artificial Peptide
PLEQRSQHCK

SEQ ID NO: 1738 - protein, 8 aa, Artificial Sequence
  Artificial Peptide
PLHERALR

SEQ ID NO: 1739 - protein, 10 aa, Artificial Sequence
  Artificial Peptide
PVIFSKASEY

SEQ ID NO: 1740 - protein, 10 aa, Artificial Sequence
  Artificial Peptide
QDFFPVIFSK

SEQ ID NO: 1741 - protein, 8 aa, Artificial Sequence
  Artificial Peptide
QDLVQENY

SEQ ID NO: 1742 - protein, 11 aa, Artificial Sequence
  Artificial Peptide
QDLVQENYLEY

SEQ ID NO: 1743 - protein, 10 aa, Artificial Sequence
  Artificial Peptide
QVPGSDPACY

SEQ ID NO: 1744 - protein, 8 aa, Artificial Sequence
  Artificial Peptide
RALIETSY

SEQ ID NO: 1745 - protein, 10 aa, Artificial Sequence
  Artificial Peptide
RALIETSYVK

SEQ ID NO: 1746 - protein, 8 aa, Artificial Sequence
  Artificial Peptide
RAREPVTK

SEQ ID NO: 1747 - protein, 8 aa, Artificial Sequence
  Artificial Peptide
SFSTTINY

SEQ ID NO: 1748 - protein, 9 aa, Artificial Sequence
  Artificial Peptide
SMLEVFEGR

SEQ ID NO: 1749 - protein, 9 aa, Artificial Sequence
  Artificial Peptide
SNQEEEGPR

SEQ ID NO: 1750 - protein, 9 aa, Artificial Sequence
  Artificial Peptide
SSFSTTINY

SEQ ID NO: 1751 - protein, 10 aa, Artificial Sequence
  Artificial Peptide
SSNQEEEGPR

SEQ ID NO: 1752 - protein, 10 aa, Artificial Sequence
  Artificial Peptide
STTINYTLWR

SEQ ID NO: 1753 - protein, 8 aa, Artificial Sequence
  Artificial Peptide
SVFAHPRK

SEQ ID NO: 1754 - protein, 8 aa, Artificial Sequence
  Artificial Peptide
TINYTLWR

SEQ ID NO: 1755 - protein, 9 aa, Artificial Sequence
  Artificial Peptide
TLKIGGEPH

SEQ ID NO: 1756 - protein, 8 aa, Artificial Sequence
  Artificial Peptide
TSYVKVLH

SEQ ID NO: 1757 - protein, 9 aa, Artificial Sequence
  Artificial Peptide
TSYVKVLHH

SEQ ID NO: 1758 - protein, 9 aa, Artificial Sequence
  Artificial Peptide
TTINYTLWR

SEQ ID NO: 1759 - protein, 9 aa, Artificial Sequence
  Artificial Peptide
VIFSKASEY

SEQ ID NO: 1760 - protein, 8 aa, Artificial Sequence
  Artificial Peptide
VTCLGLSY

SEQ ID NO: 1761 - protein, 9 aa, Artificial Sequence
  Artificial Peptide
VVEVVPISH

SEQ ID NO: 1762 - protein, 11 aa, Artificial Sequence
  Artificial Peptide
VVEVVPISHLY

SEQ ID NO: 1763 - protein, 8 aa, Artificial Sequence
  Artificial Peptide
VVPISHLY

SEQ ID NO: 1764 - protein, 11 aa, Artificial Sequence
  Artificial Peptide
WGPRALIETSY

SEQ ID NO: 1765 - protein, 11 aa, Artificial Sequence
  Artificial Peptide
YILVTCLGLSY

SEQ ID NO: 1766 - protein, 10 aa, Artificial Sequence
  Artificial Peptide
YVKVLHHTLK

SEQ ID NO: 1767 - protein, 10 aa, Artificial Sequence
  Artificial Peptide
ACYEFLWGPR

SEQ ID NO: 1768 - protein, 11 aa, Artificial Sequence
  Artificial Peptide
ALSRKVAELVH

SEQ ID NO: 1769 - protein, 9 aa, Artificial Sequence
  Artificial Peptide
ALVETSYVK

SEQ ID NO: 1770 - protein, 10 aa, Artificial Sequence
  Artificial Peptide
ASSLPTTMNY

SEQ ID NO: 1771 - protein, 8 aa, Artificial Sequence
  Artificial Peptide
ATCLGLSY

SEQ ID NO: 1772 - protein, 8 aa, Artificial Sequence
  Artificial Peptide
DSILGDPK

SEQ ID NO: 1773 - protein, 9 aa, Artificial Sequence
  Artificial Peptide
DSILGDPKK

SEQ ID NO: 1774 - protein, 9 aa, Artificial Sequence
  Artificial Peptide
EDSILGDPK

SEQ ID NO: 1775 - protein, 10 aa, Artificial Sequence
  Artificial Peptide
EDSILGDPKK

SEQ ID NO: 1776 - protein, 8 aa, Artificial Sequence
  Artificial Peptide
EFQAALSR

SEQ ID NO: 1777 - protein, 9 aa, Artificial Sequence
  Artificial Peptide
EFQAALSRK

SEQ ID NO: 1778 - protein, 9 aa, Artificial Sequence
  Artificial Peptide
EGDCAPEEK

SEQ ID NO: 1779 - protein, 10 aa, Artificial Sequence
  Artificial Peptide
ELMEVDPIGH

SEQ ID NO: 1780 - protein, 11 aa, Artificial Sequence
  Artificial Peptide
ELSVLEVFEGR

SEQ ID NO: 1781 - protein, 9 aa, Artificial Sequence
  Artificial Peptide
ELVHFLLLK

SEQ ID NO: 1782 - protein, 10 aa, Artificial Sequence
  Artificial Peptide
ELVHFLLLKY

SEQ ID NO: 1783 - protein, 11 aa, Artificial Sequence
  Artificial Peptide
ELVHFLLLKYR

SEQ ID NO: 1784 - protein, 10 aa, Artificial Sequence
  Artificial Peptide
ESEFQAALSR

SEQ ID NO: 1785 - protein, 11 aa, Artificial Sequence
  Artificial Peptide
ESEFQAALSRK

SEQ ID NO: 1786 - protein, 9 aa, Artificial Sequence
  Artificial Peptide
ETSYVKVLH

SEQ ID NO: 1787 - protein, 10 aa, Artificial Sequence
  Artificial Peptide
ETSYVKVLHH

SEQ ID NO: 1788 - protein, 9 aa, Artificial Sequence
  Artificial Peptide
EVDPIGHLY

SEQ ID NO: 1789 - protein, 9 aa, Artificial Sequence
  Artificial Peptide
FATCLGLSY

SEQ ID NO: 1790 - protein, 8 aa, Artificial Sequence
  Artificial Peptide
FFPVIFSK

SEQ ID NO: 1791 - protein, 9 aa, Artificial Sequence
  Artificial Peptide
FLLLKYRAR

SEQ ID NO: 1792 - protein, 9 aa, Artificial Sequence
  Artificial Peptide
FVQENYLEY

SEQ ID NO: 1793 - protein, 10 aa, Artificial Sequence
  Artificial Peptide
FVQENYLEYR

SEQ ID NO: 1794 - protein, 11 aa, Artificial Sequence
  Artificial Peptide
GASSLPTTMNY

SEQ ID NO: 1795 - protein, 8 aa, Artificial Sequence
  Artificial Peptide
GDCAPEEK

SEQ ID NO: 1796 - protein, 8 aa, Artificial Sequence
  Artificial Peptide
GDNQIMPK

SEQ ID NO: 1797 - protein, 10 aa, Artificial Sequence
  Artificial Peptide
GDPKKLLTQH

SEQ ID NO: 1798 - protein, 11 aa, Artificial Sequence
  Artificial Peptide
GGPHISYPPLH

SEQ ID NO: 1799 - protein, 11 aa, Artificial Sequence
  Artificial Peptide
GLLGDNQIMPK

SEQ ID NO: 1800 - protein, 9 aa, Artificial Sequence
  Artificial Peptide
GSVVGNWQY

SEQ ID NO: 1801 - protein, 11 aa, Artificial Sequence
  Artificial Peptide
HCKPEEGLEAR

SEQ ID NO: 1802 - protein, 8 aa, Artificial Sequence
  Artificial Peptide
HFLLLKYR

SEQ ID NO: 1803 - protein, 10 aa, Artificial Sequence
  Artificial Peptide
HFLLLKYRAR

SEQ ID NO: 1804 - protein, 10 aa, Artificial Sequence
  Artificial Peptide
HFVQENYLEY

SEQ ID NO: 1805 - protein, 11 aa, Artificial Sequence
  Artificial Peptide
HFVQENYLEYR

SEQ ID NO: 1806 - protein, 8 aa, Artificial Sequence
  Artificial Peptide
HISYPPLH

SEQ ID NO: 1807 - protein, 10 aa, Artificial Sequence
  Artificial Peptide
HMVKISGGPH

SEQ ID NO: 1808 - protein, 10 aa, Artificial Sequence
  Artificial Peptide
IFATCLGLSY

SEQ ID NO: 1809 - protein, 9 aa, Artificial Sequence
  Artificial Peptide
IIVLAIIAR

SEQ ID NO: 1810 - protein, 9 aa, Artificial Sequence
  Artificial Peptide
ISGGPHISY

SEQ ID NO: 1811 - protein, 8 aa, Artificial Sequence
  Artificial Peptide
IVLAIIAR

SEQ ID NO: 1812 - protein, 10 aa, Artificial Sequence
  Artificial Peptide
KISGGPHISY

SEQ ID NO: 1813 - protein, 8 aa, Artificial Sequence
  Artificial Peptide
KVLHHMVK

SEQ ID NO: 1814 - protein, 9 aa, Artificial Sequence
  Artificial Peptide
LGDNQIMPK

SEQ ID NO: 1815 - protein, 11 aa, Artificial Sequence
  Artificial Peptide
LGDPKKLLTQH

SEQ ID NO: 1816 - protein, 10 aa, Artificial Sequence
  Artificial Peptide
LGSVVGNWQY

SEQ ID NO: 1817 - protein, 10 aa, Artificial Sequence
  Artificial Peptide
LIIVLAIIAR

SEQ ID NO: 1818 - protein, 10 aa, Artificial Sequence
  Artificial Peptide
LLGDNQIMPK

SEQ ID NO: 1819 - protein, 11 aa, Artificial Sequence
  Artificial Peptide
LLIIVLAIIAR

SEQ ID NO: 1820 - protein, 8 aa, Artificial Sequence
  Artificial Peptide
LLLKYRAR

SEQ ID NO: 1821 - protein, 11 aa, Artificial Sequence
  Artificial Peptide
LLTQHFVQENY

SEQ ID NO: 1822 - protein, 9 aa, Artificial Sequence
  Artificial Peptide
LMEVDPIGH

SEQ ID NO: 1823 - protein, 11 aa, Artificial Sequence
  Artificial Peptide
LMEVDPIGHLY

SEQ ID NO: 1824 - protein, 10 aa, Artificial Sequence
  Artificial Peptide
LSRKVAELVH

SEQ ID NO: 1825 - protein, 10 aa, Artificial Sequence
  Artificial Peptide
LSVLEVFEGR

SEQ ID NO: 1826 - protein, 10 aa, Artificial Sequence
  Artificial Peptide
LTQHFVQENY

SEQ ID NO: 1827 - protein, 8 aa, Artificial Sequence
  Artificial Peptide
LVETSYVK

SEQ ID NO: 1828 - protein, 11 aa, Artificial Sequence
  Artificial Peptide
LVETSYVKVLH

SEQ ID NO: 1829 - protein, 8 aa, Artificial Sequence
  Artificial Peptide
LVHFLLLK

SEQ ID NO: 1830 - protein, 9 aa, Artificial Sequence
  Artificial Peptide
LVHFLLLKY

SEQ ID NO: 1831 - protein, 10 aa, Artificial Sequence
  Artificial Peptide
LVHFLLLKYR

SEQ ID NO: 1832 - protein, 11 aa, Artificial Sequence
  Artificial Peptide
MLGSVVGNWQY

SEQ ID NO: 1833 - protein, 10 aa, Artificial Sequence
  Artificial Peptide
MNYPLWSQSY

SEQ ID NO: 1834 - protein, 9 aa, Artificial Sequence
  Artificial Peptide
MVKISGGPH

SEQ ID NO: 1835 - protein, 11 aa, Artificial Sequence
  Artificial Peptide
PACYEFLWGPR

SEQ ID NO: 1836 - protein, 8 aa, Artificial Sequence
  Artificial Peptide
PGSDPACY

SEQ ID NO: 1837 - protein, 8 aa, Artificial Sequence
  Artificial Peptide
PLEQRSQH

SEQ ID NO: 1838 - protein, 10 aa, Artificial Sequence
  Artificial Peptide
PLEQRSQHCK

SEQ ID NO: 1839 - protein, 8 aa, Artificial Sequence
  Artificial Peptide
PLHEWVLR

SEQ ID NO: 1840 - protein, 10 aa, Artificial Sequence
  Artificial Peptide
QVPGSDPACY

SEQ ID NO: 1841 - protein, 8 aa, Artificial Sequence
  Artificial Peptide
RALVETSY

SEQ ID NO: 1842 - protein, 10 aa, Artificial Sequence
  Artificial Peptide
RALVETSYVK

SEQ ID NO: 1843 - protein, 8 aa, Artificial Sequence
  Artificial Peptide
RAREPVTK

SEQ ID NO: 1844 - protein, 8 aa, Artificial Sequence
  Artificial Peptide
SGGPHISY

SEQ ID NO: 1845 - protein, 8 aa, Artificial Sequence
  Artificial Peptide
SILGDPKK

SEQ ID NO: 1846 - protein, 8 aa, Artificial Sequence
  Artificial Peptide
SLPTTMNY

SEQ ID NO: 1847 - protein, 9 aa, Artificial Sequence
  Artificial Peptide
SSLPTTMNY

SEQ ID NO: 1848 - protein, 9 aa, Artificial Sequence
  Artificial Peptide
SVLEVFEGR

SEQ ID NO: 1849 - protein, 8 aa, Artificial Sequence
  Artificial Peptide
SVVGNWQY

SEQ ID NO: 1850 - protein, 11 aa, Artificial Sequence
  Artificial Peptide
TMNYPLWSQSY

SEQ ID NO: 1851 - protein, 8 aa, Artificial Sequence
  Artificial Peptide
TSYVKVLH

SEQ ID NO: 1852 - protein, 9 aa, Artificial Sequence
  Artificial Peptide
TSYVKVLHH

SEQ ID NO: 1853 - protein, 11 aa, Artificial Sequence
  Artificial Peptide
VAELVHFLLLK

SEQ ID NO: 1854 - protein, 8 aa, Artificial Sequence
  Artificial Peptide
VDPIGHLY

SEQ ID NO: 1855 - protein, 8 aa, Artificial Sequence
  Artificial Peptide
VLEVFEGR

SEQ ID NO: 1856 - protein, 11 aa, Artificial Sequence
  Artificial Peptide
WGPRALVETSY

SEQ ID NO: 1857 - protein, 9 aa, Artificial Sequence
  Artificial Peptide
YFFPVIFSK

SEQ ID NO: 1858 - protein, 11 aa, Artificial Sequence
  Artificial Peptide
YIFATCLGLSY

SEQ ID NO: 1859 - protein, 10 aa, Artificial Sequence
  Artificial Peptide
YVKVLHHMVK

SEQ ID NO: 1860 - protein, 11 aa, Artificial Sequence
  Artificial Peptide
CYEFLWGPRAL

SEQ ID NO: 1861 - protein, 9 aa, Artificial Sequence
  Artificial Peptide
EFLWGPRAL

SEQ ID NO: 1862 - protein, 10 aa, Artificial Sequence
  Artificial Peptide
EFLWGPRALI

SEQ ID NO: 1863 - protein, 9 aa, Artificial Sequence
  Artificial Peptide
EYLQLVFGI

SEQ ID NO: 1864 - protein, 9 aa, Artificial Sequence
  Artificial Peptide
IFSKASEYL

SEQ ID NO: 1865 - protein, 11 aa, Artificial Sequence
  Artificial Peptide
IFSKASEYLQL

SEQ ID NO: 1866 - protein, 8 aa, Artificial Sequence
  Artificial Peptide
IWEELSML

SEQ ID NO: 1867 - protein, 11 aa, Artificial Sequence
  Artificial Peptide
IWEELSMLEVF

SEQ ID NO: 1868 - protein, 8 aa, Artificial Sequence
  Artificial Peptide
KMVELVHF

SEQ ID NO: 1869 - protein, 9 aa, Artificial Sequence
  Artificial Peptide
KMVELVHFL

SEQ ID NO: 1870 - protein, 10 aa, Artificial Sequence
  Artificial Peptide
KMVELVHFLL

SEQ ID NO: 1871 - protein, 11 aa, Artificial Sequence
  Artificial Peptide
KMVELVHFLLL

SEQ ID NO: 1872 - protein, 11 aa, Artificial Sequence
  Artificial Peptide
LMQDLVQENYL

SEQ ID NO: 1873 - protein, 8 aa, Artificial Sequence
  Artificial Peptide
LWGPRALI

SEQ ID NO: 1874 - protein, 8 aa, Artificial Sequence
  Artificial Peptide
LYILVTCL

SEQ ID NO: 1875 - protein, 10 aa, Artificial Sequence
  Artificial Peptide
LYILVTCLGL

SEQ ID NO: 1876 - protein, 9 aa, Artificial Sequence
  Artificial Peptide
MFPDLESEF

SEQ ID NO: 1877 - protein, 10 aa, Artificial Sequence
  Artificial Peptide
RMFPDLESEF

SEQ ID NO: 1878 - protein, 10 aa, Artificial Sequence
  Artificial Peptide
SFSTTINYTL

SEQ ID NO: 1879 - protein, 11 aa, Artificial Sequence
  Artificial Peptide
SFSTTINYTLW

SEQ ID NO: 1880 - protein, 10 aa, Artificial Sequence
  Artificial Peptide
SYPPLHERAL

SEQ ID NO: 1881 - protein, 10 aa, Artificial Sequence
  Artificial Peptide
SYVKVLHHTL

SEQ ID NO: 1882 - protein, 8 aa, Artificial Sequence
  Artificial Peptide
VFAHPRKL

SEQ ID NO: 1883 - protein, 9 aa, Artificial Sequence
  Artificial Peptide
VFAHPRKLL

SEQ ID NO: 1884 - protein, 10 aa, Artificial Sequence
  Artificial Peptide
VFEGREDSVF

SEQ ID NO: 1885 - protein, 8 aa, Artificial Sequence
  Artificial Peptide
VMPKTGLL

SEQ ID NO: 1886 - protein, 9 aa, Artificial Sequence
  Artificial Peptide
VMPKTGLLI

SEQ ID NO: 1887 - protein, 10 aa, Artificial Sequence
  Artificial Peptide
VMPKTGLLII

SEQ ID NO: 1888 - protein, 11 aa, Artificial Sequence
  Artificial Peptide
CYEFLWGPRAL

SEQ ID NO: 1889 - protein, 9 aa, Artificial Sequence
  Artificial Peptide
EFLWGPRAL

SEQ ID NO: 1890 - protein, 10 aa, Artificial Sequence
  Artificial Peptide
EMLGSVVGNW

SEQ ID NO: 1891 - protein, 8 aa, Artificial Sequence
  Artificial Peptide
HFVQENYL

SEQ ID NO: 1892 - protein, 11 aa, Artificial Sequence
  Artificial Peptide
HMVKISGGPHI

SEQ ID NO: 1893 - protein, 8 aa, Artificial Sequence
  Artificial Peptide
IFATCLGL

SEQ ID NO: 1894 - protein, 9 aa, Artificial Sequence
  Artificial Peptide
IFSKASSSL

SEQ ID NO: 1895 - protein, 11 aa, Artificial Sequence
  Artificial Peptide
IFSKASSSLQL

SEQ ID NO: 1896 - protein, 8 aa, Artificial Sequence
  Artificial Peptide
IMPKAGLL

SEQ ID NO: 1897 - protein, 9 aa, Artificial Sequence
  Artificial Peptide
IMPKAGLLI

SEQ ID NO: 1898 - protein, 10 aa, Artificial Sequence
  Artificial Peptide
IMPKAGLLII

SEQ ID NO: 1899 - protein, 8 aa, Artificial Sequence
  Artificial Peptide
IWEELSVL

SEQ ID NO: 1900 - protein, 11 aa, Artificial Sequence
  Artificial Peptide
IWEELSVLEVF

SEQ ID NO: 1901 - protein, 10 aa, Artificial Sequence
  Artificial Peptide
LMEVDPIGHL

SEQ ID NO: 1902 - protein, 8 aa, Artificial Sequence
  Artificial Peptide
LYIFATCL

SEQ ID NO: 1903 - protein, 10 aa, Artificial Sequence
  Artificial Peptide
LYIFATCLGL

SEQ ID NO: 1904 - protein, 9 aa, Artificial Sequence
  Artificial Peptide
NWQYFFPVI

SEQ ID NO: 1905 - protein, 10 aa, Artificial Sequence
  Artificial Peptide
NWQYFFPVIF

SEQ ID NO: 1906 - protein, 8 aa, Artificial Sequence
  Artificial Peptide
QYFFPVIF

SEQ ID NO: 1907 - protein, 11 aa, Artificial Sequence
  Artificial Peptide
SYDGLLGDNQI

SEQ ID NO: 1908 - protein, 8 aa, Artificial Sequence
  Artificial Peptide
SYPPLHEW

SEQ ID NO: 1909 - protein, 10 aa, Artificial Sequence
  Artificial Peptide
SYPPLHEWVL

SEQ ID NO: 1910 - protein, 9 aa, Artificial Sequence
  Artificial Peptide
TFPDLESEF

SEQ ID NO: 1911 - protein, 9 aa, Artificial Sequence
  Artificial Peptide
VFEGREDSI

SEQ ID NO: 1912 - protein, 10 aa, Artificial Sequence
  Artificial Peptide
VFEGREDSIL

SEQ ID NO: 1913 - protein, 15 aa, Artificial Sequence
  Artificial Peptide
ALGLVGAQAPATEEQ

SEQ ID NO: 1914 - protein, 15 aa, Artificial Sequence
  Artificial Peptide
CLGLSYDGLLGDNQV

SEQ ID NO: 1915 - protein, 15 aa, Artificial Sequence
  Artificial Peptide
DGLLGDNQVMPKTGL

SEQ ID NO: 1916 - protein, 15 aa, Artificial Sequence
  Artificial Peptide
EEKIWEELSMLEVFE

SEQ ID NO: 1917 - protein, 15 aa, Artificial Sequence
  Artificial Peptide
EFLWGPRALIETSYV

SEQ ID NO: 1918 - protein, 15 aa, Artificial Sequence
  Artificial Peptide
EKIWEELSMLEVFEG

SEQ ID NO: 1919 - protein, 15 aa, Artificial Sequence
  Artificial Peptide
ENYLEYRQVPGSDPA

SEQ ID NO: 1920 - protein, 15 aa, Artificial Sequence
  Artificial Peptide
EPHISYPPLHERALR

SEQ ID NO: 1921 - protein, 15 aa, Artificial Sequence
  Artificial Peptide
ESEFQAAISRKMVEL

SEQ ID NO: 1922 - protein, 15 aa, Artificial Sequence
  Artificial Peptide
EVTLGEVPAADSPSP

SEQ ID NO: 1923 - protein, 15 aa, Artificial Sequence
  Artificial Peptide
FFPVIFSKASEYLQL

SEQ ID NO: 1924 - protein, 15 aa, Artificial Sequence
  Artificial Peptide
FPVIFSKASEYLQLV

SEQ ID NO: 1925 - protein, 15 aa, Artificial Sequence
  Artificial Peptide
GEALGLVGAQAPATE

SEQ ID NO: 1926 - protein, 15 aa, Artificial Sequence
  Artificial Peptide
GIEVVEVVPISHLYI

SEQ ID NO: 1927 - protein, 15 aa, Artificial Sequence
  Artificial Peptide
GLLIIVLAIIAIEGD

SEQ ID NO: 1928 - protein, 15 aa, Artificial Sequence
  Artificial Peptide
HFLLLKYRAREPVTK

SEQ ID NO: 1929 - protein, 15 aa, Artificial Sequence
  Artificial Peptide
HLYILVTCLGLSYDG

SEQ ID NO: 1930 - protein, 15 aa, Artificial Sequence
  Artificial Peptide
IEVVEVVPISHLYIL

SEQ ID NO: 1931 - protein, 15 aa, Artificial Sequence
  Artificial Peptide
IIAIEGDCAPEEKIW

SEQ ID NO: 1932 - protein, 15 aa, Artificial Sequence
  Artificial Peptide
IIVLAIIAIEGDCAP

SEQ ID NO: 1933 - protein, 15 aa, Artificial Sequence
  Artificial Peptide
ISHLYILVTCLGLSY

SEQ ID NO: 1934 - protein, 15 aa, Artificial Sequence
  Artificial Peptide
KAEMLESVLRNCQDF

SEQ ID NO: 1935 - protein, 15 aa, Artificial Sequence
  Artificial Peptide
KTGLLIIVLAIIAIE

SEQ ID NO: 1936 - protein, 15 aa, Artificial Sequence
  Artificial Peptide
LGEVPAADSPSPPHS

SEQ ID NO: 1937 - protein, 15 aa, Artificial Sequence
  Artificial Peptide
LGLVGAQAPATEEQQ

SEQ ID NO: 1938 - protein, 15 aa, Artificial Sequence
  Artificial Peptide
LIIVLAIIAIEGDCA

SEQ ID NO: 1939 - protein, 15 aa, Artificial Sequence
  Artificial Peptide
LLIIVLAIIAIEGDC

SEQ ID NO: 1940 - protein, 15 aa, Artificial Sequence
  Artificial Peptide
LLKYRAREPVTKAEM

SEQ ID NO: 1941 - protein, 15 aa, Artificial Sequence
  Artificial Peptide
LQLVFGIEVVEVVPI

SEQ ID NO: 1942 - protein, 15 aa, Artificial Sequence
  Artificial Peptide
LVEVTLGEVPAADSP

SEQ ID NO: 1943 - protein, 15 aa, Artificial Sequence
  Artificial Peptide
MVELVHFLLLKYRAR

SEQ ID NO: 1944 - protein, 15 aa, Artificial Sequence
  Artificial Peptide
NQVMPKTGLLIIVLA

SEQ ID NO: 1945 - protein, 15 aa, Artificial Sequence
  Artificial Peptide
PRKLLMQDLVQENYL

SEQ ID NO: 1946 - protein, 15 aa, Artificial Sequence
  Artificial Peptide
PRMFPDLESEFQAAI

SEQ ID NO: 1947 - protein, 15 aa, Artificial Sequence
  Artificial Peptide
QAAISRKMVELVHFL

SEQ ID NO: 1948 - protein, 15 aa, Artificial Sequence
  Artificial Peptide
QDFFPVIFSKASEYL

SEQ ID NO: 1949 - protein, 15 aa, Artificial Sequence
  Artificial Peptide
QDLVQENYLEYRQVP

SEQ ID NO: 1950 - protein, 15 aa, Artificial Sequence
  Artificial Peptide
QLVFGIEVVEVVPIS

SEQ ID NO: 1951 - protein, 15 aa, Artificial Sequence
  Artificial Peptide
RALIETSYVKVLHHT

SEQ ID NO: 1952 - protein, 15 aa, Artificial Sequence
  Artificial Peptide
REPVTKAEMLESVLR

SEQ ID NO: 1953 - protein, 15 aa, Artificial Sequence
  Artificial Peptide
RKLLMQDLVQENYLE

SEQ ID NO: 1954 - protein, 15 aa, Artificial Sequence
  Artificial Peptide
SHLYILVTCLGLSYD

SEQ ID NO: 1955 - protein, 15 aa, Artificial Sequence
  Artificial Peptide
SSTLVEVTLGEVPAA

SEQ ID NO: 1956 - protein, 15 aa, Artificial Sequence
  Artificial Peptide
TGLLIIVLAIIAIEG

SEQ ID NO: 1957 - protein, 15 aa, Artificial Sequence
  Artificial Peptide
VELVHFLLLKYRARE

SEQ ID NO: 1958 - protein, 15 aa, Artificial Sequence
  Artificial Peptide
VEVVPISHLYILVTC

SEQ ID NO: 1959 - protein, 15 aa, Artificial Sequence
  Artificial Peptide
VFGIEVVEVVPISHL

SEQ ID NO: 1960 - protein, 15 aa, Artificial Sequence
  Artificial Peptide
VVPISHLYILVTCLG

SEQ ID NO: 1961 - protein, 15 aa, Artificial Sequence
  Artificial Peptide
WEELSMLEVFEGRED

SEQ ID NO: 1962 - protein, 15 aa, Artificial Sequence
  Artificial Peptide
YEFLWGPRALIETSY

SEQ ID NO: 1963 - protein, 15 aa, Artificial Sequence
  Artificial Peptide
YILVTCLGLSYDGLL

SEQ ID NO: 1964 - protein, 14 aa, Artificial Sequence
  Artificial Peptide
YPPLHERALREGEE

SEQ ID NO: 1965 - protein, 15 aa, Artificial Sequence
  Artificial Peptide
YRQVPGSDPACYEFL

SEQ ID NO: 1966 - protein, 15 aa, Artificial Sequence
  Artificial Peptide
YVKVLHHTLKIGGEP

SEQ ID NO: 1967 - protein, 15 aa, Artificial Sequence
  Artificial Peptide
AELVHFLLLKYRARE

SEQ ID NO: 1968 - protein, 15 aa, Artificial Sequence
  Artificial Peptide
AGLLIIVLAIIAREG

SEQ ID NO: 1969 - protein, 15 aa, Artificial Sequence
  Artificial Peptide
ALGLVGAQAPATEEQ

SEQ ID NO: 1970 - protein, 15 aa, Artificial Sequence
  Artificial Peptide
CLGLSYDGLLGDNQI

SEQ ID NO: 1971 - protein, 15 aa, Artificial Sequence
  Artificial Peptide
DGLLGDNQIMPKAGL

SEQ ID NO: 1972 - protein, 15 aa, Artificial Sequence
  Artificial Peptide
EEKIWEELSVLEVFE

SEQ ID NO: 1973 - protein, 15 aa, Artificial Sequence
  Artificial Peptide
EFLWGPRALVETSYV

SEQ ID NO: 1974 - protein, 15 aa, Artificial Sequence
  Artificial Peptide
EKIWEELSVLEVFEG

SEQ ID NO: 1975 - protein, 15 aa, Artificial Sequence
  Artificial Peptide
ENYLEYRQVPGSDPA

SEQ ID NO: 1976 - protein, 15 aa, Artificial Sequence
  Artificial Peptide
ESEFQAALSRKVAEL

SEQ ID NO: 1977 - protein, 15 aa, Artificial Sequence
  Artificial Peptide
EVTLGEVPAAESPDP

SEQ ID NO: 1978 - protein, 15 aa, Artificial Sequence
  Artificial Peptide
FFPVIFSKASSSLQL

SEQ ID NO: 1979 - protein, 15 aa, Artificial Sequence
  Artificial Peptide
FPVIFSKASSSLQLV

SEQ ID NO: 1980 - protein, 15 aa, Artificial Sequence
  Artificial Peptide
GEALGLVGAQAPATE

SEQ ID NO: 1981 - protein, 15 aa, Artificial Sequence
  Artificial Peptide
GHLYIFATCLGLSYD

SEQ ID NO: 1982 - protein, 15 aa, Artificial Sequence
  Artificial Peptide
GIELMEVDPIGHLYI

SEQ ID NO: 1983 - protein, 15 aa, Artificial Sequence
  Artificial Peptide
GLLIIVLAIIAREGD

SEQ ID NO: 1984 - protein, 15 aa, Artificial Sequence
  Artificial Peptide
GPHISYPPLHEWVLR

SEQ ID NO: 1985 - protein, 15 aa, Artificial Sequence
  Artificial Peptide
HFLLLKYRAREPVTK

SEQ ID NO: 1986 - protein, 15 aa, Artificial Sequence
  Artificial Peptide
HLYIFATCLGLSYDG

SEQ ID NO: 1987 - protein, 15 aa, Artificial Sequence
  Artificial Peptide
IELMEVDPIGHLYIF

SEQ ID NO: 1988 - protein, 15 aa, Artificial Sequence
  Artificial Peptide
IGHLYIFATCLGLSY

SEQ ID NO: 1989 - protein, 15 aa, Artificial Sequence
  Artificial Peptide
KAEMLGSVVGNWQYF

SEQ ID NO: 1990 - protein, 15 aa, Artificial Sequence
  Artificial Peptide
KAGLLIIVLAIIARE

SEQ ID NO: 1991 - protein, 15 aa, Artificial Sequence
  Artificial Peptide
KKLLTQHFVQENYLE

SEQ ID NO: 1992 - protein, 15 aa, Artificial Sequence
  Artificial Peptide
LGEVPAAESPDPPQS

SEQ ID NO: 1993 - protein, 15 aa, Artificial Sequence
  Artificial Peptide
LGLVGAQAPATEEQE

SEQ ID NO: 1994 - protein, 15 aa, Artificial Sequence
  Artificial Peptide
LIIVLAIIAREGDCA

SEQ ID NO: 1995 - protein, 15 aa, Artificial Sequence
  Artificial Peptide
LLIIVLAIIAREGDC

SEQ ID NO: 1996 - protein, 15 aa, Artificial Sequence
  Artificial Peptide
LLKYRAREPVTKAEM

SEQ ID NO: 1997 - protein, 15 aa, Artificial Sequence
  Artificial Peptide
LQLVFGIELMEVDPI

SEQ ID NO: 1998 - protein, 15 aa, Artificial Sequence
  Artificial Peptide
LVEVTLGEVPAAESP

SEQ ID NO: 1999 - protein, 15 aa, Artificial Sequence
  Artificial Peptide
NQIMPKAGLLIIVLA

SEQ ID NO: 2000 - protein, 15 aa, Artificial Sequence
  Artificial Peptide
NWQYFFPVIFSKASS

SEQ ID NO: 2001 - protein, 15 aa, Artificial Sequence
  Artificial Peptide
PSTFPDLESEFQAAL

SEQ ID NO: 2002 - protein, 15 aa, Artificial Sequence
  Artificial Peptide
PVIFSKASSSLQLVF

SEQ ID NO: 2003 - protein, 15 aa, Artificial Sequence
  Artificial Peptide
QAALSRKVAELVHFL

SEQ ID NO: 2004 - protein, 15 aa, Artificial Sequence
  Artificial Peptide
QHFVQENYLEYRQVP

SEQ ID NO: 2005 - protein, 15 aa, Artificial Sequence
  Artificial Peptide
QLVFGIELMEVDPIG

SEQ ID NO: 2006 - protein, 15 aa, Artificial Sequence
  Artificial Peptide
QYFFPVIFSKASSSL

SEQ ID NO: 2007 - protein, 15 aa, Artificial Sequence
  Artificial Peptide
RALVETSYVKVLHHM

SEQ ID NO: 2008 - protein, 15 aa, Artificial Sequence
  Artificial Peptide
REPVTKAEMLGSVVG

SEQ ID NO: 2009 - protein, 15 aa, Artificial Sequence
  Artificial Peptide
SSTLVEVTLGEVPAA

SEQ ID NO: 2010 - protein, 15 aa, Artificial Sequence
  Artificial Peptide
VAELVHFLLLKYRAR

SEQ ID NO: 2011 - protein, 15 aa, Artificial Sequence
  Artificial Peptide
VDPIGHLYIFATCLG

SEQ ID NO: 2012 - protein, 15 aa, Artificial Sequence
  Artificial Peptide
VFGIELMEVDPIGHL

SEQ ID NO: 2013 - protein, 15 aa, Artificial Sequence
  Artificial Peptide
VGNWQYFFPVIFSKA

SEQ ID NO: 2014 - protein, 15 aa, Artificial Sequence
  Artificial Peptide
WEELSVLEVFEGRED

SEQ ID NO: 2015 - protein, 15 aa, Artificial Sequence
  Artificial Peptide
YEFLWGPRALVETSY

SEQ ID NO: 2016 - protein, 14 aa, Artificial Sequence
  Artificial Peptide
YPPLHEWVLREGEE

SEQ ID NO: 2017 - protein, 15 aa, Artificial Sequence
  Artificial Peptide
YRQVPGSDPACYEFL

SEQ ID NO: 2018 - protein, 15 aa, Artificial Sequence
  Artificial Peptide
YVKVLHHMVKISGGP

SEQ ID NO: 2019 - protein, 15 aa, Artificial Sequence
  Artificial Peptide
CLGLSYDGLLGDNQV

SEQ ID NO: 2020 - protein, 15 aa, Artificial Sequence
  Artificial Peptide
EEKIWEELSMLEVFE

SEQ ID NO: 2021 - protein, 15 aa, Artificial Sequence
  Artificial Peptide
FPDLESEFQAAISRK

SEQ ID NO: 2022 - protein, 15 aa, Artificial Sequence
  Artificial Peptide
GPRMFPDLESEFQAA

SEQ ID NO: 2023 - protein, 15 aa, Artificial Sequence
  Artificial Peptide
IIAIEGDCAPEEKIW

SEQ ID NO: 2024 - protein, 15 aa, Artificial Sequence
  Artificial Peptide
LAIIAIEGDCAPEEK

SEQ ID NO: 2025 - protein, 15 aa, Artificial Sequence
  Artificial Peptide
MQDLVQENYLEYRQV

SEQ ID NO: 2026 - protein, 15 aa, Artificial Sequence
  Artificial Peptide
QLVFGIEVVEVVPIS

SEQ ID NO: 2027 - protein, 15 aa, Artificial Sequence
  Artificial Peptide
RKLLMQDLVQENYLE

SEQ ID NO: 2028 - protein, 15 aa, Artificial Sequence
  Artificial Peptide
YDGLLGDNQVMPKTG

SEQ ID NO: 2029 - protein, 15 aa, Artificial Sequence
  Artificial Peptide
CLGLSYDGLLGDNQI

SEQ ID NO: 2030 - protein, 15 aa, Artificial Sequence
  Artificial Peptide
EEKIWEELSVLEVFE

SEQ ID NO: 2031 - protein, 15 aa, Artificial Sequence
  Artificial Peptide
FPDLESEFQAALSRK

SEQ ID NO: 2032 - protein, 15 aa, Artificial Sequence
  Artificial Peptide
IELMEVDPIGHLYIF

SEQ ID NO: 2033 - protein, 15 aa, Artificial Sequence
  Artificial Peptide
LAIIAREGDCAPEEK

SEQ ID NO: 2034 - protein, 15 aa, Artificial Sequence
  Artificial Peptide
QLVFGIELMEVDPIG

SEQ ID NO: 2035 - protein, 15 aa, Artificial Sequence
  Artificial Peptide
TQHFVQENYLEYRQV

SEQ ID NO: 2036 - protein, 15 aa, Artificial Sequence
  Artificial Peptide
YDGLLGDNQIMPKAG

SEQ ID NO: 2037 - protein, 15 aa, Artificial Sequence
  Artificial Peptide
EFQAAISRKMVELVH

SEQ ID NO: 2038 - protein, 12 aa, Artificial Sequence
  Artificial Peptide
MPLEQRSQHCKP

SEQ ID NO: 2039 - protein, 15 aa, Artificial Sequence
  Artificial Peptide
TLKIGGEPHISYPPL

SEQ ID NO: 2040 - protein, 15 aa, Artificial Sequence
  Artificial Peptide
VKVLHHTLKIGGEPH

SEQ ID NO: 2041 - protein, 15 aa, Artificial Sequence
  Artificial Peptide
EDSILGDPKKLLTQH

SEQ ID NO: 2042 - protein, 15 aa, Artificial Sequence
  Artificial Peptide
EFQAALSRKVAELVH

SEQ ID NO: 2043 - protein, 12 aa, Artificial Sequence
  Artificial Peptide
MPLEQRSQHCKP

SEQ ID NO: 2044 - protein, 9 aa, Artificial Sequence
  Artificial Peptide
LVGAQAPAT

SEQ ID NO: 2045 - protein, 9 aa, Artificial Sequence
  Artificial Peptide
LSYDGLLGD

SEQ ID NO: 2046 - protein, 9 aa, Artificial Sequence
  Artificial Peptide
LGDNQVMPK

SEQ ID NO: 2047 - protein, 9 aa, Artificial Sequence
  Artificial Peptide
IWEELSMLE

SEQ ID NO: 2048 - protein, 9 aa, Artificial Sequence
  Artificial Peptide
WGPRALIET

SEQ ID NO: 2049 - protein, 9 aa, Artificial Sequence
  Artificial Peptide
WEELSMLEV

SEQ ID NO: 2050 - protein, 9 aa, Artificial Sequence
  Artificial Peptide
LEYRQVPGS

SEQ ID NO: 2051 - protein, 9 aa, Artificial Sequence
  Artificial Peptide
ISYPPLHER

SEQ ID NO: 2052 - protein, 9 aa, Artificial Sequence
  Artificial Peptide
FQAAISRKM

SEQ ID NO: 2053 - protein, 9 aa, Artificial Sequence
  Artificial Peptide
LGEVPAADS

SEQ ID NO: 2054 - protein, 9 aa, Artificial Sequence
  Artificial Peptide
VIFSKASEY

SEQ ID NO: 2055 - protein, 9 aa, Artificial Sequence
  Artificial Peptide
IFSKASEYL

SEQ ID NO: 2056 - protein, 9 aa, Artificial Sequence
  Artificial Peptide
LGLVGAQAP

SEQ ID NO: 2057 - protein, 9 aa, Artificial Sequence
  Artificial Peptide
VVEVVPISH

SEQ ID NO: 2058 - protein, 9 aa, Artificial Sequence
  Artificial Peptide
IIVLAIIAI

SEQ ID NO: 2059 - protein, 9 aa, Artificial Sequence
  Artificial Peptide
LLKYRAREP

SEQ ID NO: 2060 - protein, 9 aa, Artificial Sequence
  Artificial Peptide
ILVTCLGLS

SEQ ID NO: 2061 - protein, 9 aa, Artificial Sequence
  Artificial Peptide
VEVVPISHL

SEQ ID NO: 2062 - protein, 9 aa, Artificial Sequence
  Artificial Peptide
IEGDCAPEE

SEQ ID NO: 2063 - protein, 9 aa, Artificial Sequence
  Artificial Peptide
LAIIAIEGD

SEQ ID NO: 2064 - protein, 9 aa, Artificial Sequence
  Artificial Peptide
LYILVTCLG

SEQ ID NO: 2065 - protein, 9 aa, Artificial Sequence
  Artificial Peptide
MLESVLRNC

SEQ ID NO: 2066 - protein, 9 aa, Artificial Sequence
  Artificial Peptide
LLIIVLAII

SEQ ID NO: 2067 - protein, 9 aa, Artificial Sequence
  Artificial Peptide
VPAADSPSP

SEQ ID NO: 2068 - protein, 9 aa, Artificial Sequence
  Artificial Peptide
VGAQAPATE

SEQ ID NO: 2069 - protein, 9 aa, Artificial Sequence
  Artificial Peptide
VLAIIAIEG

SEQ ID NO: 2070 - protein, 9 aa, Artificial Sequence
  Artificial Peptide
IVLAIIAIE

SEQ ID NO: 2071 - protein, 9 aa, Artificial Sequence
  Artificial Peptide
YRAREPVTK

SEQ ID NO: 2072 - protein, 9 aa, Artificial Sequence
  Artificial Peptide
VFGIEVVEV

SEQ ID NO: 2073 - protein, 9 aa, Artificial Sequence
  Artificial Peptide
VTLGEVPAA

SEQ ID NO: 2074 - protein, 9 aa, Artificial Sequence
  Artificial Peptide
LVHFLLLKY

SEQ ID NO: 2075 - protein, 9 aa, Artificial Sequence
  Artificial Peptide
MPKTGLLII

SEQ ID NO: 2076 - protein, 9 aa, Artificial Sequence
  Artificial Peptide
LLMQDLVQE

SEQ ID NO: 2077 - protein, 9 aa, Artificial Sequence
  Artificial Peptide
FPDLESEFQ

SEQ ID NO: 2078 - protein, 9 aa, Artificial Sequence
  Artificial Peptide
ISRKMVELV

SEQ ID NO: 2079 - protein, 9 aa, Artificial Sequence
  Artificial Peptide
FPVIFSKAS

SEQ ID NO: 2080 - protein, 9 aa, Artificial Sequence
  Artificial Peptide
VQENYLEYR

SEQ ID NO: 2081 - protein, 9 aa, Artificial Sequence
  Artificial Peptide
FGIEVVEVV

SEQ ID NO: 2082 - protein, 9 aa, Artificial Sequence
  Artificial Peptide
IETSYVKVL

SEQ ID NO: 2083 - protein, 9 aa, Artificial Sequence
  Artificial Peptide
VTKAEMLES

SEQ ID NO: 2084 - protein, 9 aa, Artificial Sequence
  Artificial Peptide
LMQDLVQEN

SEQ ID NO: 2085 - protein, 9 aa, Artificial Sequence
  Artificial Peptide
YILVTCLGL

SEQ ID NO: 2086 - protein, 9 aa, Artificial Sequence
  Artificial Peptide
LVEVTLGEV

SEQ ID NO: 2087 - protein, 9 aa, Artificial Sequence
  Artificial Peptide
LIIVLAIIA

SEQ ID NO: 2088 - protein, 9 aa, Artificial Sequence
  Artificial Peptide
VHFLLLKYR

SEQ ID NO: 2089 - protein, 9 aa, Artificial Sequence
  Artificial Peptide
VPISHLYIL

SEQ ID NO: 2090 - protein, 9 aa, Artificial Sequence
  Artificial Peptide
IEVVEVVPI

SEQ ID NO: 2091 - protein, 9 aa, Artificial Sequence
  Artificial Peptide
ISHLYILVT

SEQ ID NO: 2092 - protein, 9 aa, Artificial Sequence
  Artificial Peptide
LSMLEVFEG

SEQ ID NO: 2093 - protein, 9 aa, Artificial Sequence
  Artificial Peptide
LWGPRALIE

SEQ ID NO: 2094 - protein, 9 aa, Artificial Sequence
  Artificial Peptide
VTCLGLSYD

SEQ ID NO: 2095 - protein, 9 aa, Artificial Sequence
  Artificial Peptide
LHERALREG

SEQ ID NO: 2096 - protein, 9 aa, Artificial Sequence
  Artificial Peptide
VPGSDPACY

SEQ ID NO: 2097 - protein, 9 aa, Artificial Sequence
  Artificial Peptide
VLHHTLKIG

SEQ ID NO: 2098 - protein, 9 aa, Artificial Sequence
  Artificial Peptide
VHFLLLKYR

SEQ ID NO: 2099 - protein, 9 aa, Artificial Sequence
  Artificial Peptide
LIIVLAIIA

SEQ ID NO: 2100 - protein, 9 aa, Artificial Sequence
  Artificial Peptide
LVGAQAPAT

SEQ ID NO: 2101 - protein, 9 aa, Artificial Sequence
  Artificial Peptide
LSYDGLLGD

SEQ ID NO: 2102 - protein, 9 aa, Artificial Sequence
  Artificial Peptide
LGDNQIMPK

SEQ ID NO: 2103 - protein, 9 aa, Artificial Sequence
  Artificial Peptide
IWEELSVLE

SEQ ID NO: 2104 - protein, 9 aa, Artificial Sequence
  Artificial Peptide
WGPRALVET

SEQ ID NO: 2105 - protein, 9 aa, Artificial Sequence
  Artificial Peptide
WEELSVLEV

SEQ ID NO: 2106 - protein, 9 aa, Artificial Sequence
  Artificial Peptide
LEYRQVPGS

SEQ ID NO: 2107 - protein, 9 aa, Artificial Sequence
  Artificial Peptide
FQAALSRKV

SEQ ID NO: 2108 - protein, 9 aa, Artificial Sequence
  Artificial Peptide
LGEVPAAES

SEQ ID NO: 2109 - protein, 9 aa, Artificial Sequence
  Artificial Peptide
VIFSKASSS

SEQ ID NO: 2110 - protein, 9 aa, Artificial Sequence
  Artificial Peptide
IFSKASSSL

SEQ ID NO: 2111 - protein, 9 aa, Artificial Sequence
  Artificial Peptide
LGLVGAQAP

SEQ ID NO: 2112 - protein, 9 aa, Artificial Sequence
  Artificial Peptide
YIFATCLGL

SEQ ID NO: 2113 - protein, 9 aa, Artificial Sequence
  Artificial Peptide
LMEVDPIGH

SEQ ID NO: 2114 - protein, 9 aa, Artificial Sequence
  Artificial Peptide
IIVLAIIAR

SEQ ID NO: 2115 - protein, 9 aa, Artificial Sequence
  Artificial Peptide
ISYPPLHEW

SEQ ID NO: 2116 - protein, 9 aa, Artificial Sequence
  Artificial Peptide
LLKYRAREP

SEQ ID NO: 2117 - protein, 9 aa, Artificial Sequence
  Artificial Peptide
IFATCLGLS

SEQ ID NO: 2118 - protein, 9 aa, Artificial Sequence
  Artificial Peptide
MEVDPIGHL

SEQ ID NO: 2119 - protein, 9 aa, Artificial Sequence
  Artificial Peptide
LYIFATCLG

SEQ ID NO: 2120 - protein, 9 aa, Artificial Sequence
  Artificial Peptide
MLGSVVGNW

SEQ ID NO: 2121 - protein, 9 aa, Artificial Sequence
  Artificial Peptide
LLIIVLAII

SEQ ID NO: 2122 - protein, 9 aa, Artificial Sequence
  Artificial Peptide
LTQHFVQEN

SEQ ID NO: 2123 - protein, 9 aa, Artificial Sequence
  Artificial Peptide
VPAAESPDP

SEQ ID NO: 2124 - protein, 9 aa, Artificial Sequence
  Artificial Peptide
VGAQAPATE

SEQ ID NO: 2125 - protein, 9 aa, Artificial Sequence
  Artificial Peptide
VLAIIAREG

SEQ ID NO: 2126 - protein, 9 aa, Artificial Sequence
  Artificial Peptide
IVLAIIARE

SEQ ID NO: 2127 - protein, 9 aa, Artificial Sequence
  Artificial Peptide
YRAREPVTK

SEQ ID NO: 2128 - protein, 9 aa, Artificial Sequence
  Artificial Peptide
VFGIELMEV

SEQ ID NO: 2129 - protein, 9 aa, Artificial Sequence
  Artificial Peptide
VTLGEVPAA

SEQ ID NO: 2130 - protein, 9 aa, Artificial Sequence
  Artificial Peptide
MPKAGLLII

SEQ ID NO: 2131 - protein, 9 aa, Artificial Sequence
  Artificial Peptide
YFFPVIFSK

SEQ ID NO: 2132 - protein, 9 aa, Artificial Sequence
  Artificial Peptide
FPDLESEFQ

SEQ ID NO: 2133 - protein, 9 aa, Artificial Sequence
  Artificial Peptide
FSKASSSLQ

SEQ ID NO: 2134 - protein, 9 aa, Artificial Sequence
  Artificial Peptide
LSRKVAELV

SEQ ID NO: 2135 - protein, 9 aa, Artificial Sequence
  Artificial Peptide
VQENYLEYR

SEQ ID NO: 2136 - protein, 9 aa, Artificial Sequence
  Artificial Peptide
FGIELMEVD

SEQ ID NO: 2137 - protein, 9 aa, Artificial Sequence
  Artificial Peptide
FPVIFSKAS

SEQ ID NO: 2138 - protein, 9 aa, Artificial Sequence
  Artificial Peptide
VETSYVKVL

SEQ ID NO: 2139 - protein, 9 aa, Artificial Sequence
  Artificial Peptide
VTKAEMLGS

SEQ ID NO: 2140 - protein, 9 aa, Artificial Sequence
  Artificial Peptide
LVEVTLGEV

SEQ ID NO: 2141 - protein, 9 aa, Artificial Sequence
  Artificial Peptide
LVHFLLLKY

SEQ ID NO: 2142 - protein, 9 aa, Artificial Sequence
  Artificial Peptide
IGHLYIFAT

SEQ ID NO: 2143 - protein, 9 aa, Artificial Sequence
  Artificial Peptide
IELMEVDPI

SEQ ID NO: 2144 - protein, 9 aa, Artificial Sequence
  Artificial Peptide
WQYFFPVIF

SEQ ID NO: 2145 - protein, 9 aa, Artificial Sequence
  Artificial Peptide
LSVLEVFEG

SEQ ID NO: 2146 - protein, 9 aa, Artificial Sequence
  Artificial Peptide
LWGPRALVE

SEQ ID NO: 2147 - protein, 9 aa, Artificial Sequence
  Artificial Peptide
LHEWVLREG

SEQ ID NO: 2148 - protein, 9 aa, Artificial Sequence
  Artificial Peptide
VPGSDPACY

SEQ ID NO: 2149 - protein, 9 aa, Artificial Sequence
  Artificial Peptide
VLHHMVKIS

SEQ ID NO: 2150 - protein, 9 aa, Artificial Sequence
  Artificial Peptide
LSYDGLLGD

SEQ ID NO: 2151 - protein, 9 aa, Artificial Sequence
  Artificial Peptide
IWEELSMLE

SEQ ID NO: 2152 - protein, 9 aa, Artificial Sequence
  Artificial Peptide
LESEFQAAI

SEQ ID NO: 2153 - protein, 9 aa, Artificial Sequence
  Artificial Peptide
MFPDLESEF

SEQ ID NO: 2154 - protein, 9 aa, Artificial Sequence
  Artificial Peptide
IEGDCAPEE

SEQ ID NO: 2155 - protein, 9 aa, Artificial Sequence
  Artificial Peptide
IAIEGDCAP

SEQ ID NO: 2156 - protein, 9 aa, Artificial Sequence
  Artificial Peptide
LVQENYLEY

SEQ ID NO: 2157 - protein, 9 aa, Artificial Sequence
  Artificial Peptide
FGIEVVEVV

SEQ ID NO: 2158 - protein, 9 aa, Artificial Sequence
  Artificial Peptide
LMQDLVQEN

SEQ ID NO: 2159 - protein, 9 aa, Artificial Sequence
  Artificial Peptide
LLGDNQVMP

SEQ ID NO: 2160 - protein, 9 aa, Artificial Sequence
  Artificial Peptide
LSYDGLLGD

SEQ ID NO: 2161 - protein, 9 aa, Artificial Sequence
  Artificial Peptide
IWEELSVLE

SEQ ID NO: 2162 - protein, 9 aa, Artificial Sequence
  Artificial Peptide
LESEFQAAL

SEQ ID NO: 2163 - protein, 9 aa, Artificial Sequence
  Artificial Peptide
MEVDPIGHL

SEQ ID NO: 2164 - protein, 9 aa, Artificial Sequence
  Artificial Peptide
IAREGDCAP

SEQ ID NO: 2165 - protein, 9 aa, Artificial Sequence
  Artificial Peptide
FGIELMEVD

SEQ ID NO: 2166 - protein, 9 aa, Artificial Sequence
  Artificial Peptide
FVQENYLEY

SEQ ID NO: 2167 - protein, 9 aa, Artificial Sequence
  Artificial Peptide
LLGDNQIMP

SEQ ID NO: 2168 - protein, 9 aa, Artificial Sequence
  Artificial Peptide
AAISRKMVE

SEQ ID NO: 2169 - protein, 9 aa, Artificial Sequence
  Artificial Peptide
MPLEQRSQH

SEQ ID NO: 2170 - protein, 9 aa, Artificial Sequence
  Artificial Peptide
IGGEPHISY

SEQ ID NO: 2171 - protein, 9 aa, Artificial Sequence
  Artificial Peptide
LHHTLKIGG

SEQ ID NO: 2172 - protein, 9 aa, Artificial Sequence
  Artificial Peptide
ILGDPKKLL

SEQ ID NO: 2173 - protein, 9 aa, Artificial Sequence
  Artificial Peptide
AALSRKVAE

SEQ ID NO: 2174 - protein, 9 aa, Artificial Sequence
  Artificial Peptide
MPLEQRSQH

SEQ ID NO: 2175 - protein, 9 aa, Artificial Sequence
  Artificial Peptide
YLEPAIAKY

SEQ ID NO: 2176 - protein, 10 aa, Artificial Sequence
  Artificial Peptide
FLPSDYFPSV

SEQ ID NO: 2177 - protein, 10 aa, Artificial Sequence
  Artificial Peptide
FLPSDYFPSV

SEQ ID NO: 2178 - protein, 10 aa, Artificial Sequence
  Artificial Peptide
FLPSDYFPSV

SEQ ID NO: 2179 - protein, 10 aa, Artificial Sequence
  Artificial Peptide
FLPSDYFPSV

SEQ ID NO: 2180 - protein, 10 aa, Artificial Sequence
  Artificial Peptide
FLPSDYFPSV

SEQ ID NO: 2181 - protein, 10 aa, Artificial Sequence
  Artificial Peptide
FLPSDYFPSV

SEQ ID NO: 2182 - protein, 9 aa, Artificial Sequence
  Artificial Peptide
YVIKVSARV

SEQ ID NO: 2183 - protein, 10 aa, Artificial Sequence
  Artificial Peptide
KVFPYALINK

SEQ ID NO: 2184 - protein, 9 aa, Artificial Sequence
  Artificial Peptide
AVDLYHFLK

SEQ ID NO: 2185 - protein, 10 aa, Artificial Sequence
  Artificial Peptide
KVFPYALINK

SEQ ID NO: 2186 - protein, 11 aa, Artificial Sequence
  Artificial Peptide
STLPETYVVRR

SEQ ID NO: 2187 - protein, 10 aa, Artificial Sequence
  Artificial Peptide
KVFPYALINK

SEQ ID NO: 2188 - protein, 9 aa, Artificial Sequence
  Artificial Peptide
AYIDNYNKF

SEQ ID NO: 2189 - protein, 9 aa, Artificial Sequence
  Artificial Peptide
APRTLVYLL

SEQ ID NO: 2190 - protein, 9 aa, Artificial Sequence
  Artificial Peptide
FPFKYAAAF

SEQ ID NO: 2191 - protein, 9 aa, Artificial Sequence
  Artificial Peptide
FPFKYAAAF

SEQ ID NO: 2192 - protein, 9 aa, Artificial Sequence
  Artificial Peptide
FPFKYAAAF

SEQ ID NO: 2193 - protein, 9 aa, Artificial Sequence
  Artificial Peptide
FPFKYAAAF

SEQ ID NO: 2194 - protein, 13 aa, Artificial Sequence
  Artificial Peptide
PKYVKQNTLKLAT

SEQ ID NO: 2195 - protein, 12 aa, Artificial Sequence
  Artificial Peptide
YKTIAFDEEARR

SEQ ID NO: 2196 - protein, 13 aa, Artificial Sequence
  Artificial Peptide
PKYVKQNTLKLAT

SEQ ID NO: 2197 - protein, 13 aa, Artificial Sequence
  Artificial Peptide
YARFSQTTLKQKT

SEQ ID NO: 2198 - protein, 13 aa, Artificial Sequence
  Artificial Peptide
YARFSQTTLKQKT

SEQ ID NO: 2199 - protein, 14 aa, Artificial Sequence
  Artificial Peptide
QYIKANSKFIGITE

SEQ ID NO: 2200 - protein, 14 aa, Artificial Sequence
  Artificial Peptide
QYIKANSKFIGITE

SEQ ID NO: 2201 - protein, 14 aa, Artificial Sequence
  Artificial Peptide
QYIKANSKFIGITE

SEQ ID NO: 2202 - protein, 14 aa, Artificial Sequence
  Artificial Peptide
QYIKANSKFIGITE

SEQ ID NO: 2203 - protein, 14 aa, Artificial Sequence
  Artificial Peptide
QYIKANSKFIGITE

SEQ ID NO: 2204 - protein, 15 aa, Artificial Sequence
  Artificial Peptide
EALIHQLKINPYVLS

SEQ ID NO: 2205 - protein, 14 aa, Artificial Sequence
  Artificial Peptide
QYIKANAKFIGITE

SEQ ID NO: 2206 - protein, 24 aa, Artificial Sequence
  Artificial Peptide
GRTQDENPVVHFFKNIVTPRTPPP

SEQ ID NO: 2207 - protein, 13 aa, Artificial Sequence
  Artificial Peptide
NGQIGNDPNRDIL

SEQ ID NO: 2208 - protein, 14 aa, Artificial Sequence
  Artificial Peptide
YARFQSQTTLKQKT

SEQ ID NO: 2209 - protein, 14 aa, Artificial Sequence
  Artificial Peptide
QYIKANSKFIGITE

SEQ ID NO: 2210 - protein, 14 aa, Artificial Sequence
  Artificial Peptide
QYIKANSKFIGITE

SEQ ID NO: 2211 - protein, 21 aa, Artificial Sequence
  Artificial Peptide
DIEKKIAKMEKASSVFNVVNS

SEQ ID NO: 2212 - protein, 16 aa, Artificial Sequence
  Artificial Peptide
GAVDSILGGVATYGAA

SEQ ID NO: 2213 - protein, 13 aa, Artificial Sequence
  Artificial Peptide
  VARIANT 1, 13: Xaa = D-Alanine or L-Alanine
  VARIANT 3: Xaa = cyclohexylalanine, phenylalanine, or tyrosine
XKXVWANTLKAAX

SEQ ID NO: 2214 - protein, 9 aa, Artificial Sequence
  Artificial Peptide
KVAELVHFL

SEQ ID NO: 2215 - protein, 9 aa, Artificial Sequence
  Artificial Peptide
KLAELVHFL

SEQ ID NO: 2216 - protein, 9 aa, Artificial Sequence
  Artificial Peptide
KMAELVHFL

SEQ ID NO: 2217 - protein, 9 aa, Artificial Sequence
  Artificial Peptide
KLAELVHFV

SEQ ID NO: 2218 - protein, 9 aa, Artificial Sequence
  Artificial Peptide
KMAELVHFV

SEQ ID NO: 2219 - protein, 9 aa, Artificial Sequence
  Artificial Peptide
KIWEELSVL

SEQ ID NO: 2220 - protein, 9 aa, Artificial Sequence
  Artificial Peptide
KLWEELSVV

SEQ ID NO: 2221 - protein, 8 aa, Artificial Sequence
  Artificial Peptide
ATCLGLSY

SEQ ID NO: 2222 - protein, 11 aa, Artificial Sequence
  Artificial Peptide
VVEVVPISHLY

SEQ ID NO: 2223 - protein, 11 aa, Artificial Sequence
  Artificial Peptide
TMNYPLWSQSY

SEQ ID NO: 2224 - protein, 11 aa, Artificial Sequence
  Artificial Peptide
LMEVDPIGHLY

SEQ ID NO: 2225 - protein, 8 aa, Artificial Sequence
  Artificial Peptide
VTDLGLSY

SEQ ID NO: 2226 - protein, 9 aa, Artificial Sequence
  Artificial Peptide
STFSTTINY

SEQ ID NO: 2227 - protein, 9 aa, Artificial Sequence
  Artificial Peptide
MTDLVQENY

SEQ ID NO: 2228 - protein, 9 aa, Artificial Sequence
  Artificial Peptide
STLPTTMNY

SEQ ID NO: 2229 - protein, 9 aa, Artificial Sequence
  Artificial Peptide
GTVVGNWQY

SEQ ID NO: 2230 - protein, 9 aa, Artificial Sequence
  Artificial Peptide
ETDPIGHLY

SEQ ID NO: 2231 - protein, 9 aa, Artificial Sequence
  Artificial Peptide
ITGGPHISY

SEQ ID NO: 2232 - protein, 10 aa, Artificial Sequence
  Artificial Peptide
ATSFSTTINY

SEQ ID NO: 2233 - protein, 10 aa, Artificial Sequence
  Artificial Peptide
ASDFSTTINY

SEQ ID NO: 2234 - protein, 10 aa, Artificial Sequence
  Artificial Peptide
LTQDLVQENY

SEQ ID NO: 2235 - protein, 10 aa, Artificial Sequence
  Artificial Peptide
ATSLPTTMNY

SEQ ID NO: 2236 - protein, 10 aa, Artificial Sequence
  Artificial Peptide
ASDLPTTMNY

SEQ ID NO: 2237 - protein, 10 aa, Artificial Sequence
  Artificial Peptide
LTDHFVQENY

SEQ ID NO: 2238 - protein, 9 aa, Artificial Sequence
  Artificial Peptide
SVFSTTINK

SEQ ID NO: 2239 - protein, 9 aa, Artificial Sequence
  Artificial Peptide
SVFSTTINR

SEQ ID NO: 2240 - protein, 9 aa, Artificial Sequence
  Artificial Peptide
TVINYTLWR

SEQ ID NO: 2241 - protein, 9 aa, Artificial Sequence
  Artificial Peptide
TVINYTLWK

SEQ ID NO: 2242 - protein, 9 aa, Artificial Sequence
  Artificial Peptide
LVHFLLLKR

SEQ ID NO: 2243 - protein, 9 aa, Artificial Sequence
  Artificial Peptide
YVFPVIFSK

SEQ ID NO: 2244 - protein, 9 aa, Artificial Sequence
  Artificial Peptide
YVFPVIFSR

SEQ ID NO: 2245 - protein, 8 aa, Artificial Sequence
  Artificial Peptide
SVFAHPRR

SEQ ID NO: 2246 - protein, 9 aa, Artificial Sequence
  Artificial Peptide
AVIETSYVK

SEQ ID NO: 2247 - protein, 9 aa, Artificial Sequence
  Artificial Peptide
AVIETSYVR

SEQ ID NO: 2248 - protein, 9 aa, Artificial Sequence
  Artificial Peptide
IVYPPLHER

SEQ ID NO: 2249 - protein, 9 aa, Artificial Sequence
  Artificial Peptide
IVYPPLHEK

SEQ ID NO: 2250 - protein, 8 aa, Artificial Sequence
  Artificial Peptide
LWGPRALI

SEQ ID NO: 2251 - protein, 8 aa, Artificial Sequence
  Artificial Peptide
QYFFPVIF

SEQ ID NO: 2252 - protein, 8 aa, Artificial Sequence
  Artificial Peptide
SYPPLHEW

SEQ ID NO: 2253 - protein, 10 aa, Artificial Sequence
  Artificial Peptide
SYPPLHEWVL

SEQ ID NO: 2254 - protein, 11 aa, Artificial Sequence
  Artificial Peptide
SFSTTINYTLW

SEQ ID NO: 2255 - protein, 11 aa, Artificial Sequence
  Artificial Peptide
IFSKASEYLQL

SEQ ID NO: 2256 - protein, 11 aa, Artificial Sequence
  Artificial Peptide
IFSKASSSLQL

SEQ ID NO: 2257 - protein, 11 aa, Artificial Sequence
  Artificial Peptide
IWEELSVLEVF

SEQ ID NO: 2258 - protein, 9 aa, Artificial Sequence
  Artificial Peptide
MYPDLESEF

SEQ ID NO: 2259 - protein, 9 aa, Artificial Sequence
  Artificial Peptide
KYVELVHFF

SEQ ID NO: 2260 - protein, 9 aa, Artificial Sequence
  Artificial Peptide
IYSKASEYF

SEQ ID NO: 2261 - protein, 9 aa, Artificial Sequence
  Artificial Peptide
EYLQLVFGF

SEQ ID NO: 2262 - protein, 9 aa, Artificial Sequence
  Artificial Peptide
VYPKTGLLF

SEQ ID NO: 2263 - protein, 9 aa, Artificial Sequence
  Artificial Peptide
TYPDLESEF

SEQ ID NO: 2264 - protein, 9 aa, Artificial Sequence
  Artificial Peptide
NYQYFFPVF

SEQ ID NO: 2265 - protein, 9 aa, Artificial Sequence
  Artificial Peptide
IYSKASSSF

SEQ ID NO: 2266 - protein, 9 aa, Artificial Sequence
  Artificial Peptide
IYPKAGLLF

SEQ ID NO: 2267 - protein, 10 aa, Artificial Sequence
  Artificial Peptide
SYSTTINYTF

SEQ ID NO: 2268 - protein, 10 aa, Artificial Sequence
  Artificial Peptide
LYILVTCLGF

SEQ ID NO: 2269 - protein, 10 aa, Artificial Sequence
  Artificial Peptide
VYPKTGLLIF

SEQ ID NO: 2270 - protein, 10 aa, Artificial Sequence
  Artificial Peptide
EYLWGPRALF

SEQ ID NO: 2271 - protein, 10 aa, Artificial Sequence
  Artificial Peptide
SYVKVLHHTF

SEQ ID NO: 2272 - protein, 10 aa, Artificial Sequence
  Artificial Peptide
NYQYFFPVIF

SEQ ID NO: 2273 - protein, 10 aa, Artificial Sequence
  Artificial Peptide
LYIFATCLGF

SEQ ID NO: 2274 - protein, 10 aa, Artificial Sequence
  Artificial Peptide
IYPKAGLLIF

SEQ ID NO: 2275 - protein, 10 aa, Artificial Sequence
  Artificial Peptide
SYPPLHEWVF

SEQ ID NO: 2276 - protein, 9 aa, Artificial Sequence
  Artificial Peptide
KMVELVHFL

SEQ ID NO: 2277 - protein, 10 aa, Artificial Sequence
  Artificial Peptide
KMVELVHFLL

SEQ ID NO: 2278 - protein, 11 aa, Artificial Sequence
  Artificial Peptide
KMVELVHFLLL

SEQ ID NO: 2279 - protein, 9 aa, Artificial Sequence
  Artificial Peptide
KASEYLQLV

SEQ ID NO: 2280 - protein, 10 aa, Artificial Sequence
  Artificial Peptide
YLQLVFGIEV

SEQ ID NO: 2281 - protein, 10 aa, Artificial Sequence
  Artificial Peptide
LVFGIEVVEV

SEQ ID NO: 2282 - protein, 9 aa, Artificial Sequence
  Artificial Peptide
KVAELVHFL

SEQ ID NO: 2283 - protein, 10 aa, Artificial Sequence
  Artificial Peptide
KVAELVHFLL

SEQ ID NO: 2284 - protein, 11 aa, Artificial Sequence
  Artificial Peptide
QLVFGIELMEV

SEQ ID NO: 2285 - protein, 10 aa, Artificial Sequence
  Artificial Peptide
LVFGIELMEV

SEQ ID NO: 2286 - protein, 11 aa, Artificial Sequence
  Artificial Peptide
IMPKAGLLIIV

SEQ ID NO: 2287 - protein, 9 aa, Artificial Sequence
  Artificial Peptide
KIWEELSVL

SEQ ID NO: 2288 - protein, 9 aa, Artificial Sequence
  Artificial Peptide
FLWGPRALV

SEQ ID NO: 2289 - protein, 9 aa, Artificial Sequence
  Artificial Peptide
YTAVVPLVY

SEQ ID NO: 2290 - protein, 10 aa, Artificial Sequence
  Artificial Peptide
FLPSDYFPSV

SEQ ID NO: 2291 - protein, 10 aa, Artificial Sequence
  Artificial Peptide
FLPSDYFPSV

SEQ ID NO: 2292 - protein, 10 aa, Artificial Sequence
  Artificial Peptide
FLPSDYFPSV

SEQ ID NO: 2293 - protein, 10 aa, Artificial Sequence
  Artificial Peptide
FLPSDYFPSV

SEQ ID NO: 2294 - protein, 10 aa, Artificial Sequence
  Artificial Peptide
FLPSDYFPSV

SEQ ID NO: 2295 - protein, 10 aa, Artificial Sequence
  Artificial Peptide
KVFPYALINK

SEQ ID NO: 2296 - protein, 10 aa, Artificial Sequence
  Artificial Peptide
KVFPYALINK

SEQ ID NO: 2297 - protein, 9 aa, Artificial Sequence
  Artificial Peptide
AYIDNYNKF

SEQ ID NO: 2298 - protein, 10 aa, Artificial Sequence
  Artificial Peptide
KVFPYALINK

SEQ ID NO: 2299 - protein, 10 aa, Artificial Sequence
  Artificial Peptide
KVFPYALINK

SEQ ID NO: 2300 - protein, 11 aa, Artificial Sequence
  Artificial Peptide
STLPETYVVRR

SEQ ID NO: 2301 - protein, 9 aa, Artificial Sequence
  Artificial Peptide
FTQAGYPAL

SEQ ID NO: 2302 - protein, 9 aa, Artificial Sequence
  Artificial Peptide
APRTLVYLL

SEQ ID NO: 2303 - protein, 8 aa, Artificial Sequence
  Artificial Peptide
FLKDYQLL

SEQ ID NO: 2304 - protein, 9 aa, Artificial Sequence
  Artificial Peptide
FRYNGLIHR

SEQ ID NO: 2305 - protein, 9 aa, Artificial Sequence
  Artificial Peptide
FPFKYAAAF

SEQ ID NO: 2306 - protein, 9 aa, Artificial Sequence
  Artificial Peptide
FPFKYAAAF

SEQ ID NO: 2307 - protein, 9 aa, Artificial Sequence
  Artificial Peptide
FPFKYAAAF

SEQ ID NO: 2308 - protein, 9 aa, Artificial Sequence
  Artificial Peptide
AEMGKYSFY

SEQ ID NO: 2309 - protein, 9 aa, Artificial Sequence
  Artificial Peptide
FPFKYAAAF

SEQ ID NO: 2310 - protein, 9 aa, Artificial Sequence
  Artificial Peptide
FPFKYAAAF

SEQ ID NO: 2311 - protein, 9 aa, Artificial Sequence
  Artificial Peptide
FPFKYAAAF

SEQ ID NO: 2312 - protein, 9 aa, Artificial Sequence
  Artificial Peptide
QYDDAVYKL

SEQ ID NO: 2313 - protein, 9 aa, Artificial Sequence
  Artificial Peptide
YRHDGGNVL

SEQ ID NO: 2314 - protein, 9 aa, Artificial Sequence
  Artificial Peptide
YRHDGGNVL

SEQ ID NO: 2315 - protein, 10 aa, Artificial Sequence
  Artificial Peptide
SGPSNTYPEI

SEQ ID NO: 2316 - protein, 8 aa, Artificial Sequence
  Artificial Peptide
RGYVFQGL

SEQ ID NO: 2317 - protein, 10 aa, Artificial Sequence
  Artificial Peptide
RGPYRAFVTI

SEQ ID NO: 2318 - protein, 9 aa, Artificial Sequence
  Artificial Peptide
KFNPMKTYI

SEQ ID NO: 2319 - protein, 12 aa, Artificial Sequence
  Artificial Peptide
IPQSLDSYWTSL

SEQ ID NO: 2320 - protein, 14 aa, Artificial Sequence
  Artificial Peptide
YPKYVKQNTLKLAT

SEQ ID NO: 2321 - protein, 16 aa, Artificial Sequence
  Artificial Peptide
VVHFFKNIVTPRTPPY

SEQ ID NO: 2322 - protein, 14 aa, Artificial Sequence
  Artificial Peptide
YAAFAAAKTAAAFA

SEQ ID NO: 2323 - protein, 12 aa, Artificial Sequence
  Artificial Peptide
YKTIAFDEEARR

SEQ ID NO: 2324 - protein, 14 aa, Artificial Sequence
  Artificial Peptide
YARFQSQTTLKQKT

SEQ ID NO: 2325 - protein, 14 aa, Artificial Sequence
  Artificial Peptide
YARFQRQTTLKAAA

SEQ ID NO: 2326 - protein, 14 aa, Artificial Sequence
  Artificial Peptide
YARFQSQTTLKQKT

SEQ ID NO: 2327 - protein, 14 aa, Artificial Sequence
  Artificial Peptide
YARFQSQTTLKQKT

SEQ ID NO: 2328 - protein, 14 aa, Artificial Sequence
  Artificial Peptide
QYIKANSKFIGITE

SEQ ID NO: 2329 - protein, 14 aa, Artificial Sequence
  Artificial Peptide
QYIKANSKFIGITE

SEQ ID NO: 2330 - protein, 14 aa, Artificial Sequence
  Artificial Peptide
QYIKANSKFIGITE

SEQ ID NO: 2331 - protein, 14 aa, Artificial Sequence
  Artificial Peptide
QYIKANSKFIGITE

SEQ ID NO: 2332 - protein, 14 aa, Artificial Sequence
  Artificial Peptide
QYIKANSKFIGITE

SEQ ID NO: 2333 - protein, 15 aa, Artificial Sequence
  Artificial Peptide
EALIHQLKINPYVLS

SEQ ID NO: 2334 - protein, 14 aa, Artificial Sequence
  Artificial Peptide
QYIKANAKFIGITE

SEQ ID NO: 2335 - protein, 14 aa, Artificial Sequence
  Artificial Peptide
QYIKANAKFIGITE

SEQ ID NO: 2336 - protein, 13 aa, Artificial Sequence
  Artificial Peptide
PKYVKQNTLKLAT

SEQ ID NO: 2337 - protein, 13 aa, Artificial Sequence
  Artificial Peptide
NGQIGNDPNRDIL

SEQ ID NO: 2338 - protein, 14 aa, Artificial Sequence
  Artificial Peptide
YARFQSQTTLKQKT

SEQ ID NO: 2339 - protein, 17 aa, Artificial Sequence
  Artificial Peptide
YAHAAHAAHAAHAAHAA

SEQ ID NO: 2340 - protein, 17 aa, Artificial Sequence
  Artificial Peptide
YAHAAHAAHAAHAAHAA

SEQ ID NO: 2341 - protein, 17 aa, Artificial Sequence
  Artificial Peptide
YAHAAHAAHAAHAAHAA

SEQ ID NO: 2342 - protein, 17 aa, Artificial Sequence
  Artificial Peptide
YNTDGSTDYGILQINSR

SEQ ID NO: 2343 - protein, 17 aa, Artificial Sequence
  Artificial Peptide
YAHAAHAAHAAHAAHAA

SEQ ID NO: 2344 - protein, 17 aa, Artificial Sequence
  Artificial Peptide
YAHAAHAAHAAHAAHAA

SEQ ID NO: 2345 - protein, 16 aa, Artificial Sequence
  Artificial Peptide
YLEDARRKKAIYEKKK

SEQ ID NO: 2346 - protein, 16 aa, Artificial Sequence
  Artificial Peptide
YLEDARRKKAIYEKKK

SEQ ID NO: 2347 - protein, 9 aa, Artificial Sequence
  Artificial Peptide
KMVELVHFL

SEQ ID NO: 2348 - protein, 10 aa, Artificial Sequence
  Artificial Peptide
KMVELVHFLL

SEQ ID NO: 2349 - protein, 11 aa, Artificial Sequence
  Artificial Peptide
KMVELVHFLLL

SEQ ID NO: 2350 - protein, 9 aa, Artificial Sequence
  Artificial Peptide
KASEYLQLV

SEQ ID NO: 2351 - protein, 10 aa, Artificial Sequence
  Artificial Peptide
YLQLVFGIEV

SEQ ID NO: 2352 - protein, 10 aa, Artificial Sequence
  Artificial Peptide
LVFGIEVVEV

SEQ ID NO: 2353 - protein, 9 aa, Artificial Sequence
  Artificial Peptide
KIWEELSML

SEQ ID NO: 2354 - protein, 9 aa, Artificial Sequence
  Artificial Peptide
FLWGPRALI

SEQ ID NO: 2355 - protein, 10 aa, Artificial Sequence
  Artificial Peptide
ALIETSYVKV

SEQ ID NO: 2356 - protein, 10 aa, Artificial Sequence
  Artificial Peptide
TLVEVTLGEV

SEQ ID NO: 2357 - protein, 9 aa, Artificial Sequence
  Artificial Peptide
KVAELVHFL

SEQ ID NO: 2358 - protein, 10 aa, Artificial Sequence
  Artificial Peptide
KVAELVHFLL

SEQ ID NO: 2359 - protein, 11 aa, Artificial Sequence
  Artificial Peptide
QLVFGIELMEV

SEQ ID NO: 2360 - protein, 10 aa, Artificial Sequence
  Artificial Peptide
LVFGIELMEV

SEQ ID NO: 2361 - protein, 11 aa, Artificial Sequence
  Artificial Peptide
HLYIFATCLGL

SEQ ID NO: 2362 - protein, 9 aa, Artificial Sequence
  Artificial Peptide
YIFATCLGL

SEQ ID NO: 2363 - protein, 11 aa, Artificial Sequence
  Artificial Peptide
IMPKAGLLIIV

SEQ ID NO: 2364 - protein, 9 aa, Artificial Sequence
  Artificial Peptide
KIWEELSVL

SEQ ID NO: 2365 - protein, 9 aa, Artificial Sequence
  Artificial Peptide
FLWGPRALV

SEQ ID NO: 2366 - protein, 9 aa, Artificial Sequence
  Artificial Peptide
KMVELVHFL

SEQ ID NO: 2367 - protein, 10 aa, Artificial Sequence
  Artificial Peptide
KMVELVHFLL

SEQ ID NO: 2368 - protein, 11 aa, Artificial Sequence
  Artificial Peptide
KMVELVHFLLL

SEQ ID NO: 2369 - protein, 9 aa, Artificial Sequence
  Artificial Peptide
KASEYLQLV

SEQ ID NO: 2370 - protein, 10 aa, Artificial Sequence
  Artificial Peptide
YLQLVFGIEV

SEQ ID NO: 2371 - protein, 10 aa, Artificial Sequence
  Artificial Peptide
LVFGIEVVEV

SEQ ID NO: 2372 - protein, 9 aa, Artificial Sequence
  Artificial Peptide
KVAELVHFL

SEQ ID NO: 2373 - protein, 10 aa, Artificial Sequence
  Artificial Peptide
KVAELVHFLL

SEQ ID NO: 2374 - protein, 11 aa, Artificial Sequence
  Artificial Peptide
QLVFGIELMEV

SEQ ID NO: 2375 - protein, 10 aa, Artificial Sequence
  Artificial Peptide
LVFGIELMEV

SEQ ID NO: 2376 - protein, 11 aa, Artificial Sequence
  Artificial Peptide
IMPKAGLLIIV

SEQ ID NO: 2377 - protein, 9 aa, Artificial Sequence
  Artificial Peptide
KIWEELSVL

SEQ ID NO: 2378 - protein, 9 aa, Artificial Sequence
  Artificial Peptide
FLWGPRALV

SEQ ID NO: 2379 - protein, 15 aa, Artificial Sequence
  Artificial Peptide
LGEVPAADSPSPPHS

SEQ ID NO: 2380 - protein, 15 aa, Artificial Sequence
  Artificial Peptide
ESEFQAAISRKMVEL

SEQ ID NO: 2381 - protein, 15 aa, Artificial Sequence
  Artificial Peptide
GIEVVEVVPISHLYI

SEQ ID NO: 2382 - protein, 15 aa, Artificial Sequence
  Artificial Peptide
DGLLGDNQVMPKTGL

SEQ ID NO: 2383 - protein, 15 aa, Artificial Sequence
  Artificial Peptide
NQVMPKTGLLIIVLA

SEQ ID NO: 2384 - protein, 15 aa, Artificial Sequence
  Artificial Peptide
KTGLLIIVLAIIAIE

SEQ ID NO: 2385 - protein, 15 aa, Artificial Sequence
  Artificial Peptide
TGLLIIVLAIIAIEG

SEQ ID NO: 2386 - protein, 15 aa, Artificial Sequence
  Artificial Peptide
GLLIIVLAIIAIEGD

SEQ ID NO: 2387 - protein, 15 aa, Artificial Sequence
  Artificial Peptide
LLIIVLAIIAIEGDC

SEQ ID NO: 2388 - protein, 15 aa, Artificial Sequence
  Artificial Peptide
LIIVLAIIAIEGDCA

SEQ ID NO: 2389 - protein, 15 aa, Artificial Sequence
  Artificial Peptide
EPHISYPPLHERALR

SEQ ID NO: 2390 - protein, 15 aa, Artificial Sequence
  Artificial Peptide
ALGLVGAQAPATEEQ

SEQ ID NO: 2391 - protein, 15 aa, Artificial Sequence
  Artificial Peptide
ESEFQAALSRKVAEL

SEQ ID NO: 2392 - protein, 15 aa, Artificial Sequence
  Artificial Peptide
NWQYFFPVIFSKASS

SEQ ID NO: 2393 - protein, 15 aa, Artificial Sequence
  Artificial Peptide
PVIFSKASSSLQLVF

SEQ ID NO: 2394 - protein, 15 aa, Artificial Sequence
  Artificial Peptide
LQLVFGIELMEVDPI

SEQ ID NO: 2395 - protein, 15 aa, Artificial Sequence
  Artificial Peptide
GHLYIFATCLGLSYD

SEQ ID NO: 2396 - protein, 15 aa, Artificial Sequence
  Artificial Peptide
DGLLGDNQIMPKAGL

SEQ ID NO: 2397 - protein, 15 aa, Artificial Sequence
  Artificial Peptide
NQIMPKAGLLIIVLA

SEQ ID NO: 2398 - protein, 15 aa, Artificial Sequence
  Artificial Peptide
KAGLLIIVLAIIARE

SEQ ID NO: 2399 - protein, 15 aa, Artificial Sequence
  Artificial Peptide
AGLLIIVLAIIAREG

SEQ ID NO: 2400 - protein, 15 aa, Artificial Sequence
  Artificial Peptide
LLIIVLAIIAREGDC

SEQ ID NO: 2401 - protein, 15 aa, Artificial Sequence
  Artificial Peptide
GPHISYPPLHEWVLR

SEQ ID NO: 2402 - protein, 15 aa, Artificial Sequence
  Artificial Peptide
ESEFQAAISRKMVEL

SEQ ID NO: 2403 - protein, 15 aa, Artificial Sequence
  Artificial Peptide
GIEVVEVVPISHLYI

SEQ ID NO: 2404 - protein, 15 aa, Artificial Sequence
  Artificial Peptide
KTGLLIIVLAIIAIE

SEQ ID NO: 2405 - protein, 15 aa, Artificial Sequence
  Artificial Peptide
ESEFQAALSRKVAEL

SEQ ID NO: 2406 - protein, 15 aa, Artificial Sequence
  Artificial Peptide
NWQYFFPVIFSKASS

SEQ ID NO: 2407 - protein, 15 aa, Artificial Sequence
  Artificial Peptide
PVIFSKASSSLQLVF

SEQ ID NO: 2408 - protein, 15 aa, Artificial Sequence
  Artificial Peptide
LQLVFGIELMEVDPI

SEQ ID NO: 2409 - protein, 15 aa, Artificial Sequence
  Artificial Peptide
GPRMFPDLESEFQAA

SEQ ID NO: 2410 - protein, 15 aa, Artificial Sequence
  Artificial Peptide
FPDLESEFQAAISRK

SEQ ID NO: 2411 - protein, 15 aa, Artificial Sequence
  Artificial Peptide
EFQAAISRKMVELVH

SEQ ID NO: 2412 - protein, 15 aa, Artificial Sequence
  Artificial Peptide
QLVFGIEVVEVVPIS

SEQ ID NO: 2413 - protein, 15 aa, Artificial Sequence
  Artificial Peptide
CLGLSYDGLLGDNQV

SEQ ID NO: 2414 - protein, 15 aa, Artificial Sequence
  Artificial Peptide
YDGLLGDNQVMPKTG

SEQ ID NO: 2415 - protein, 15 aa, Artificial Sequence
  Artificial Peptide
LAIIAIEGDCAPEEK

SEQ ID NO: 2416 - protein, 15 aa, Artificial Sequence
  Artificial Peptide
IIAIEGDCAPEEKIW

SEQ ID NO: 2417 - protein, 15 aa, Artificial Sequence
  Artificial Peptide
EEKIWEELSMLEVFE

SEQ ID NO: 2418 - protein, 15 aa, Artificial Sequence
  Artificial Peptide
RKLLMQDLVQENYLE

SEQ ID NO: 2419 - protein, 15 aa, Artificial Sequence
  Artificial Peptide
MQDLVQENYLEYRQV

SEQ ID NO: 2420 - protein, 15 aa, Artificial Sequence
  Artificial Peptide
VKVLHHTLKIGGEPH

SEQ ID NO: 2421 - protein, 15 aa, Artificial Sequence
  Artificial Peptide
TLKIGGEPHISYPPL

SEQ ID NO: 2422 - protein, 15 aa, Artificial Sequence
  Artificial Peptide
FPDLESEFQAALSRK

SEQ ID NO: 2423 - protein, 15 aa, Artificial Sequence
  Artificial Peptide
EFQAALSRKVAELVH

SEQ ID NO: 2424 - protein, 15 aa, Artificial Sequence
  Artificial Peptide
QLVFGIELMEVDPIG

SEQ ID NO: 2425 - protein, 15 aa, Artificial Sequence
  Artificial Peptide
IELMEVDPIGHLYIF

SEQ ID NO: 2426 - protein, 15 aa, Artificial Sequence
  Artificial Peptide
CLGLSYDGLLGDNQI

SEQ ID NO: 2427 - protein, 15 aa, Artificial Sequence
  Artificial Peptide
YDGLLGDNQIMPKAG

SEQ ID NO: 2428 - protein, 15 aa, Artificial Sequence
  Artificial Peptide
LAIIAREGDCAPEEK

SEQ ID NO: 2429 - protein, 15 aa, Artificial Sequence
  Artificial Peptide
EEKIWEELSVLEVFE

SEQ ID NO: 2430 - protein, 15 aa, Artificial Sequence
  Artificial Peptide
EDSILGDPKKLLTQH

SEQ ID NO: 2431 - protein, 15 aa, Artificial Sequence
  Artificial Peptide
TQHFVQENYLEYRQV

SEQ ID NO: 2432 - protein, 15 aa, Artificial Sequence
  Artificial Peptide
ESEFQAAISRKMVEL

SEQ ID NO: 2433 - protein, 15 aa, Artificial Sequence
  Artificial Peptide
ESEFQAALSRKVAEL

SEQ ID NO: 2434 - protein, 15 aa, Artificial Sequence
  Artificial Peptide
NWQYFFPVIFSKASS

SEQ ID NO: 2435 - protein, 15 aa, Artificial Sequence
  Artificial Peptide
IELMEVDPIGHLYIF

SEQ ID NO: 2436 - protein, 15 aa, Artificial Sequence
  Artificial Peptide
EDSILGDPKKLLTQH

SEQ ID NO: 2437 - protein, 9 aa, Artificial Sequence
  DR7 preferred motif
  MISC_FEATURE (1)..(1): May be  Met, Phe, Leu, Ile, Val, Trp or Tyr
  MISC_FEATURE (5)..(5): May be any amino acid
  MISC_FEATURE (6)..(6): May be Ile, Val, Met, Ser, Ala, Cys, Thr, Pro or Leu
  MISC_FEATURE (8)..(8): May be any amino acid
  MISC_FEATURE (9)..(9): May be either Ile or Val
XMWAXXMXX

SEQ ID NO: 2438 - protein, 9 aa, Artificial Sequence
  DR7 deleterious motif
  MISC_FEATURE (1)..(1): May be any amino acid
  MISC_FEATURE (3)..(3): May be any amino acid
  MISC_FEATURE (5)..(6): May be any amino acid
  MISC_FEATURE (7)..(7): May be Gly, Arg or Asp
XCXGXXXNG

SEQ ID NO: 2439 - protein, 314 aa, Homo sapiens
MPLEQRSQHCKPEEGLEARGEALGLVGAQAPATEEQQTASSSSTLVEVTLGEVPAADSPSPPHSPQGASSFSTTINYTLWRQSDEGSSNQEEEGPRMFPDLESEFQAAISRKMVELVHFLLLKYRAREPVTKAEMLESVLRNCQDFFPVIFSKASEYLQLVFGIEVVEVVPISHLYILVTCLGLSYDGLLGDNQVMPKTGLLIIVLAIIAIEGDCAPEEKIWEELSMLEVFEGREDSVFAHPRKLLMQDLVQENYLEYRQVPGSDPACYEFLWGPRALIETSYVKVLHHTLKIGGEPHISYPPLHERALREGEE

SEQ ID NO: 2440 - protein, 314 aa, Homo sapiens
MPLEQRSQHCKPEEGLEARGEALGLVGAQAPATEEQEAASSSSTLVEVTLGEVPAAESPDPPQSPQGASSLPTTMNYPLWSQSYEDSSNQEEEGPSTFPDLESEFQAALSRKVAELVHFLLLKYRAREPVTKAEMLGSVVGNWQYFFPVIFSKASSSLQLVFGIELMEVDPIGHLYIFATCLGLSYDGLLGDNQIMPKAGLLIIVLAIIAREGDCAPEEKIWEELSVLEVFEGREDSILGDPKKLLTQHFVQENYLEYRQVPGSDPACYEFLWGPRALVETSYVKVLHHMVKISGGPHISYPPLHEWVLREGEE

SEQ ID NO: 2441 - protein, 13 aa, Artificial
  Artificial Peptide
  VARIANT (1)..(1): May be D-Alanine or L-Alanine
  MISC_FEATURE (3)..(3): May be Cyclohexylalanine, Phenylalanine or Tyrosine
  VARIANT (13)..(13): May be D-Alanine or L-Alanine
AKXVAAWTLKAAA

SEQ ID NO: 2442 - protein, 9 aa, Artificial
  Artificial Peptide
SSFSTTINK

SEQ ID NO: 2443 - protein, 10 aa, Artificial
  Artificial Peptide
STTINYTLWK

SEQ ID NO: 2444 - protein, 9 aa, Artificial
  Artificial Peptide
LVHFLLLKK

SEQ ID NO: 2445 - protein, 9 aa, Artificial
  Artificial Peptide
SMLEVFEGK

SEQ ID NO: 2446 - protein, 9 aa, Artificial
  Artificial Peptide
SVLEVFEGK

SEQ ID NO: 2447 - protein, 9 aa, Artificial
  Artificial Peptide
FPISHLYIL

SEQ ID NO: 2448 - protein, 9 aa, Artificial
  Artificial Peptide
VPISHLYAL

SEQ ID NO: 2449 - protein, 9 aa, Artificial
  Artificial Peptide
VPISMLYIL

SEQ ID NO: 2450 - protein, 10 aa, Artificial
  Artificial Peptide
VPISHLYILI

SEQ ID NO: 2451 - protein, 8 aa, Artificial
  Artificial Peptide
FPISHLYI

SEQ ID NO: 2452 - protein, 9 aa, Artificial
  Artificial Peptide
FPISHLYII

SEQ ID NO: 2453 - protein, 9 aa, Artificial
  Artificial Peptide
FPISHLYIL

SEQ ID NO: 2454 - protein, 10 aa, Artificial
  Artificial Peptide
FPISHLYILI

SEQ ID NO: 2455 - protein, 10 aa, Artificial
  Artificial Peptide
FPISHLYILV

SEQ ID NO: 2456 - protein, 8 aa, Artificial
  Artificial Peptide
FPKTGLLI

SEQ ID NO: 2457 - protein, 9 aa, Artificial
  Artificial Peptide
FPTKGLLII

SEQ ID NO: 2458 - protein, 11 aa, Artificial
  Artificial Peptide
FPRKLLMQDLI

SEQ ID NO: 2459 - protein, 11 aa, Artificial
  Artificial Peptide
FPRALIETSYI

SEQ ID NO: 2460 - protein, 11 aa, Artificial
  Artificial Peptide
FPRALIETSYV

SEQ ID NO: 2461 - protein, 9 aa, Artificial
  Artificial Peptide
FPHISYPPL

SEQ ID NO: 2462 - protein, 8 aa, Artificial
  Artificial Peptide
FPQGASSI

SEQ ID NO: 2463 - protein, 9 aa, Artificial
  Artificial Peptide
FPTTMNYPI

SEQ ID NO: 2464 - protein, 9 aa, Artificial
  Artificial Peptide
FPTTMNYPL

SEQ ID NO: 2465 - protein, 9 aa, Artificial
  Artificial Peptide
LPTTMNYPI

SEQ ID NO: 2466 - protein, 8 aa, Artificial
  Artificial Peptide
YPLWSQSI

SEQ ID NO: 2467 - protein, 8 aa, Artificial
  Artificial Peptide
FPLWSQSI

SEQ ID NO: 2468 - protein, 9 aa, Artificial
  Artificial Peptide
FPIGHLYII

SEQ ID NO: 2469 - protein, 10 aa, Artificial
  Artificial Peptide
FPIGHLYIFA

SEQ ID NO: 2470 - protein, 10 aa, Artificial
  Artificial Peptide
FPIGHLYIFI

SEQ ID NO: 2471 - protein, 9 aa, Artificial
  Artificial Peptide
MPVAGLLII

SEQ ID NO: 2472 - protein, 10 aa, Artificial
  Artificial Peptide
MPKAGLLIII

SEQ ID NO: 2473 - protein, 8 aa, Artificial
  Artificial Peptide
FPKAGLLI

SEQ ID NO: 2474 - protein, 10 aa, Artificial
  Artificial Peptide
FPKAGLLIII

SEQ ID NO: 2475 - protein, 10 aa, Artificial
  Artificial Peptide
FPKAGLLIIV

SEQ ID NO: 2476 - protein, 11 aa, Artificial
  Artificial Peptide
FPRALVETSYI

SEQ ID NO: 2477 - protein, 11 aa, Artificial
  Artificial Peptide
FPRALVETSYV

SEQ ID NO: 2478 - protein, 9 aa, Artificial
  Artificial Peptide
FPHISYPPI

SEQ ID NO: 2479 - protein, 10 aa, Artificial
  Artificial Peptide
FPTTMNYPLW
